(19) United States
(12) Patent Application Publication
(10) Pub. No.: US 2025/0388897 A1
(43) Pub. Date: Dec. 25, 2025

(54) NUCLEIC ACID COMPOUNDS

(71) Applicant: E-Therapeutics PLC, London (GB)

(72) Inventors: Amy MCCARTHY, Cambridge (GB); Graham CRAGGS, Bicester (GB); James LONGDEN, Maidenhead (GB); Ines DE SANTIAGO, London (GB); Duncan BROWN, Berkeley, CA (US); Ahmad Ali MORTAZAVI, London (GB); Viviana MANNELLA, London (GB); Muthusamy JAYARAMAN, Cambridge, MA (US); Alexandre DEBACKER, London (GB); Adrian James MOGG, Blackwater (GB)

(21) Appl. No.: 18/879,713

(22) PCT Filed: Jul. 27, 2023
(86) PCT No.: PCT/EP2023/070904

§ 371 Date: Dec. 27, 2024

Related U.S. Application Data
(60) Provisional application No. 63/369,624, filed on Jul. 27, 2022.

(30) Foreign Application Priority Data
Feb. 6, 2023 (EP) 23155109.4

(51) Int. Cl. C12N 15/113

(52) U.S. Cl. CPC C12N 15/113; C12N 2310/14; C12N 2310/315; C12N 2310/321; C12N 2310/322; C12N 2310/332; C12N 2310/346; C12N 2310/351; C12N 2320/30

(57) ABSTRACT

The present invention provides novel nucleic acid compound suitable for therapeutic use. Additionally, the present invention provides methods of making these compounds, as well as methods of using such compounds for the treatment of various diseases and conditions.

### FIELD

[0001] The present invention provides novel nucleic acid compounds, suitable for therapeutic use. Additionally, the present invention provides methods of making these compounds, as well as methods of using such compounds for the treatment of various diseases and conditions.

### BACKGROUND OF THE INVENTION

[0002] Nucleic acid compounds have important therapeutic applications in medicine. Nucleic acids can be used to silence genes that are responsible for a particular disease. Gene-silencing prevents formation of a protein by inhibiting translation. Importantly, gene-silencing agents are a promising alternative to traditional small, organic compounds that inhibit the function of the protein linked to the disease. siRNA, antisense RNA, and micro-RNA are oligonucleotides/oligonucleosides that prevent the formation of proteins by gene-silencing.

[0003] A number of modified siRNA compounds in particular have been developed in the last two decades for diagnostic and therapeutic purposes, including siRNA/RNAi therapeutic agents for the treatment of various diseases including central-nervous-system diseases, inflammatory diseases, metabolic disorders, oncology, infectious diseases, and ocular diseases.

[0004] The present invention relates to nucleic acid compounds, for use in the treatment and/or prevention of disease.

### STATEMENTS OF INVENTION

[0005] According to a first aspect of the present invention, there is provided a nucleic acid for inhibiting expression of HCII, comprising a duplex region that comprises a first strand and a second strand that is at least partially complementary to the first strand, wherein said first strand is: (i) at least partially complementary to a portion of RNA transcribed from the HCII gene, and (ii) comprises at least 17 contiguous nucleosides differing by 0 or 1 nucleosides from any one of the first strand sequences as listed in Table 2.

[0006] According to a second aspect of the present invention, there is provided a nucleic acid for inhibiting expression of HCII, comprising a duplex region that comprises a first strand and a second strand that is at least partially complementary to the first strand, wherein said first strand is: (i) at least partially complementary to a portion of RNA transcribed from the HCII gene, and (ii) comprises at least 17 contiguous nucleosides differing by 0 or 1 nucleosides from any one of the first strand modified sequences as listed in Table 3.

[0007] A nucleic acid as described herein, wherein the first strand comprises nucleosides 2-18 of any one of the sequences according to the above first and second aspects of the present invention.

[0008] A nucleic acid according to the above first aspect of the present invention, wherein the second strand comprises a nucleoside sequence of at least 17 contiguous nucleosides differing by 0 or 1 nucleosides from any one of the second strand sequences as listed in Table 2, and wherein the second strand has a region of at least 85% complementarity over the 17 contiguous nucleosides to the first strand.

[0009] A nucleic acid according to the above first aspect of the present invention, wherein the second strand comprises a nucleoside sequence of at least 17 contiguous nucleosides differing by 0 or 1 nucleosides from any one of the second strand sequences as listed in Table 2, and wherein the duplex region comprises at least 14, 15, 16 or 17 complementary base pairs.

[0010] A nucleic acid according to the above second aspect of the present invention, wherein the second strand comprises a nucleoside sequence of at least 17 contiguous nucleosides differing by 0 or 1 nucleosides from any one of the second strand modified sequences as listed in Table 4, and wherein the second strand has a region of at least 85% complementarity over the 17 contiguous nucleosides to the first strand.

[0011] A nucleic acid according to the above second aspect of the present invention, wherein the second strand comprises a nucleoside sequence of at least 17 contiguous nucleosides differing by 0 or 1 nucleosides from any one of the second strand modified sequences as listed in Table 4, and wherein the duplex region comprises at least 14, 15, 16 or 17 complementary base pairs.

[0012] A nucleic acid according to the above first aspect of the present invention, wherein the first strand comprises any one of the first strand sequences as listed in Table 2.

[0013] A nucleic acid according to the above second aspect of the present invention, wherein the first strand comprises any one of the first strand modified sequences as listed in Table 3.

[0014] A nucleic acid according to the above first aspect of the present invention, wherein the second strand comprises any one of the second strand sequences as listed in Table 2.

[0015] A nucleic acid according to the above second aspect of the present invention, wherein the second strand comprises any one of the second strand modified sequences as listed in Table 4.

[0016] A nucleic acid according to the above first aspect of the present invention, wherein the first strand comprises any one of the following sequences: SEQ ID NO: 140, SEQ ID NO: 152, SEQ ID NO: 136, SEQ ID NO: 138, SEQ ID NO: 139, SEQ ID NO: 151, SEQ ID NO: 162, SEQ ID NO: 166, SEQ ID NO: 186, SEQ ID NO: 188, SEQ ID NO: 194, SEQ ID NO: 224, SEQ ID NO: 235, SEQ ID NO: 236, SEQ ID NO: 238, SEQ ID NO: 239, SEQ ID NO: 240, SEQ ID NO: 124, SEQ ID NO: 135.

[0017] A nucleic acid according to the above second aspect of the present invention, wherein the first strand comprises any one of the following sequences: SEQ ID NO: 560, SEQ ID NO: 392, SEQ ID NO: 376, SEQ ID NO: 378, SEQ ID NO: 379, SEQ ID NO: 391, SEQ ID NO: 402, SEQ ID NO: 406, SEQ ID NO: 426, SEQ ID NO: 428, SEQ ID NO: 434, SEQ ID NO: 464, SEQ ID NO: 475, SEQ ID NO: 476, SEQ ID NO: 478, SEQ ID NO: 479, SEQ ID NO: 480, SEQ ID NO: 499, SEQ ID NO: 504, SEQ ID NO: 518, SEQ ID NO: 519, SEQ ID NO: 539, SEQ ID NO: 555, SEQ ID NO: 559.

[0018] A nucleic acid according to the above first aspect of the present invention, wherein the second strand comprises any one of the following sequences: SEQ ID NO: 260, SEQ ID NO: 272, SEQ ID NO: 256, SEQ ID NO: 258, SEQ ID NO: 259, SEQ ID NO: 271, SEQ ID NO: 282, SEQ ID NO: 286, SEQ ID NO: 306, SEQ ID NO: 308, SEQ ID NO: 314, SEQ ID NO: 344, SEQ ID NO: 355, SEQ ID NO: 356, SEQ ID NO: 358, SEQ ID NO: 359, SEQ ID NO: 360, SEQ ID NO: 244, SEQ ID NO: 255.

[0019] A nucleic acid according to the above second aspect of the present invention, wherein the second strand comprises any one of the following sequences: SEQ ID NO: 760, SEQ ID NO: 592, SEQ ID NO: 576, SEQ ID NO: 578, SEQ ID NO: 579, SEQ ID NO: 591, SEQ ID NO: 602, SEQ ID NO: 606, SEQ ID NO: 626, SEQ ID NO: 628, SEQ ID NO: 634, SEQ ID NO: 664, SEQ ID NO: 675, SEQ ID NO: 676, SEQ ID NO: 678, SEQ ID NO: 679, SEQ ID NO: 680, SEQ ID NO: 699, SEQ ID NO: 704, SEQ ID NO: 718, SEQ ID NO: 719, SEQ ID NO: 739, SEQ ID NO: 755, SEQ ID NO: 759.

[0020] A nucleic acid comprising first and second strands that comprise, consist of, or consist essentially of a nucleoside sequence differing by 0 or 1 nucleosides from any one of the following first and second sequences:

| Unmodified first strand | Unmodified second strand |
|---|---|
| SEQ ID NO: 140 | SEQ ID NO: 260 |
| SEQ ID NO: 152 | SEQ ID NO: 272 |
| SEQ ID NO: 136 | SEQ ID NO: 256 |
| SEQ ID NO: 138 | SEQ ID NO: 258 |
| SEQ ID NO: 139 | SEQ ID NO: 259 |
| SEQ ID NO: 151 | SEQ ID NO: 271 |
| SEQ ID NO: 162 | SEQ ID NO: 282 |
| SEQ ID NO: 166 | SEQ ID NO: 286 |
| SEQ ID NO: 186 | SEQ ID NO: 306 |
| SEQ ID NO: 188 | SEQ ID NO: 308 |
| SEQ ID NO: 194 | SEQ ID NO: 314 |
| SEQ ID NO: 224 | SEQ ID NO: 344 |
| SEQ ID NO: 235 | SEQ ID NO: 355 |
| SEQ ID NO: 236 | SEQ ID NO: 356 |
| SEQ ID NO: 238 | SEQ ID NO: 358 |
| SEQ ID NO: 239 | SEQ ID NO: 359 |
| SEQ ID NO: 240 | SEQ ID NO: 360 |
| SEQ ID NO: 139 | SEQ ID NO: 259 |
| SEQ ID NO: 124 | SEQ ID NO: 244 |
| SEQ ID NO: 138 | SEQ ID NO: 258 |
| SEQ ID NO: 139 | SEQ ID NO: 259 |
| SEQ ID NO: 139 | SEQ ID NO: 259 |
| SEQ ID NO: 135 | SEQ ID NO: 255 |
| SEQ ID NO: 139 | SEQ ID NO: 259 |

[0021] A nucleic acid comprising first and second strands that comprise, consist of, or consist essentially of a nucleoside sequence differing by 0 or 1 nucleosides from any one of the following first and second sequences:

| Modified first strand | Modified second strand |
|---|---|
| SEQ ID NO: 560 | SEQ ID NO: 760 |
| SEQ ID NO: 392 | SEQ ID NO: 592 |
| SEQ ID NO: 376 | SEQ ID NO: 576 |
| SEQ ID NO: 378 | SEQ ID NO: 578 |
| SEQ ID NO: 379 | SEQ ID NO: 579 |
| SEQ ID NO: 391 | SEQ ID NO: 591 |
| SEQ ID NO: 402 | SEQ ID NO: 602 |
| SEQ ID NO: 406 | SEQ ID NO: 606 |
| SEQ ID NO: 426 | SEQ ID NO: 626 |
| SEQ ID NO: 428 | SEQ ID NO: 628 |
| SEQ ID NO: 434 | SEQ ID NO: 634 |
| SEQ ID NO: 464 | SEQ ID NO: 664 |
| SEQ ID NO: 475 | SEQ ID NO: 675 |
| SEQ ID NO: 476 | SEQ ID NO: 676 |
| SEQ ID NO: 478 | SEQ ID NO: 678 |
| SEQ ID NO: 479 | SEQ ID NO: 679 |
| SEQ ID NO: 480 | SEQ ID NO: 680 |
| SEQ ID NO: 499 | SEQ ID NO: 699 |
| SEQ ID NO: 504 | SEQ ID NO: 704 |
| SEQ ID NO: 518 | SEQ ID NO: 718 |
| SEQ ID NO: 519 | SEQ ID NO: 719 |
| SEQ ID NO: 539 | SEQ ID NO: 739 |
| SEQ ID NO: 555 | SEQ ID NO: 755 |
| SEQ ID NO: 559 | SEQ ID NO: 759 |

[0022] A nucleic acid comprising first and second strands that comprise, consist of, or consist essentially of a nucleoside sequence differing by 0 or 1 nucleosides from any one of the following first and second sequences:

| Unmodified first strand | Unmodified second strand |
|---|---|
| SEQ ID NO: 138 | SEQ ID NO: 258 |
| SEQ ID NO: 151 | SEQ ID NO: 271 |
| SEQ ID NO: 152 | SEQ ID NO: 272 |
| SEQ ID NO: 186 | SEQ ID NO: 306 |
| SEQ ID NO: 188 | SEQ ID NO: 308 |

[0023] A nucleic acid comprising first and second strands that comprise, consist of, or consist essentially of a nucleoside sequence differing by 0 or 1 nucleosides from any one of the following first and second sequences: 5

| Modified first strand | Modified second strand |
|---|---|
| SEQ ID NO: 378 | SEQ ID NO: 578 |
| SEQ ID NO: 391 | SEQ ID NO: 591 |
| SEQ ID NO: 392 | SEQ ID NO: 592 |
| SEQ ID NO: 426 | SEQ ID NO: 626 |
| SEQ ID NO: 428 | SEQ ID NO: 628 |

[0024] A nucleic acid comprising first and second strands that comprise, consist of, or consist essentially of a nucleoside sequence differing by 0 or 1 nucleosides from any one of the following first and second sequences:

| Unmodified first strand | Unmodified second strand |
|---|---|
| SEQ ID NO: 136 | SEQ ID NO: 256 |
| SEQ ID NO: 140 | SEQ ID NO: 260 |
| SEQ ID NO: 151 | SEQ ID NO: 271 |
| SEQ ID NO: 152 | SEQ ID NO: 272 |
| SEQ ID NO: 188 | SEQ ID NO: 308 |

[0025] A nucleic acid comprising first and second strands that comprise, consist of, or consist essentially of a nucleoside sequence differing by 0 or 1 nucleosides from any one of the following first and second sequences:

| Modified first strand | Modified second strand |
|---|---|
| SEQ ID NO: 376 | SEQ ID NO: 576 |
| SEQ ID NO: 380 | SEQ ID NO: 580 |
| SEQ ID NO: 391 | SEQ ID NO: 591 |
| SEQ ID NO: 392 | SEQ ID NO: 592 |
| SEQ ID NO: 428 | SEQ ID NO: 628 |

[0026] A nucleic acid comprising first and second strands that comprise, consist of, or consist essentially of a nucleoside sequence differing by 0 or 1 nucleosides from any one of the following first and second sequences:

| Modified first strand | Modified second strand |
|---|---|
| SEQ ID NO: 762 | SEQ ID NO: 772 |
| SEQ ID NO: 763 | SEQ ID NO: 773 |
| SEQ ID NO: 764 | SEQ ID NO: 774 |
| SEQ ID NO: 765 | SEQ ID NO: 775 |
| SEQ ID NO: 766 | SEQ ID NO: 776 |
| SEQ ID NO: 767 | SEQ ID NO: 777 |
| SEQ ID NO: 768 | SEQ ID NO: 778 |
| SEQ ID NO: 769 | SEQ ID NO: 779 |
| SEQ ID NO: 770 | SEQ ID NO: 780 |
| SEQ ID NO: 771 | SEQ ID NO: 781 |
| SEQ ID NO: 782 | SEQ ID NO: 773 |
| SEQ ID NO: 783 | SEQ ID NO: 775 |
| SEQ ID NO: 784 | SEQ ID NO: 777 |
| SEQ ID NO: 785 | SEQ ID NO: 779 |
| SEQ ID NO: 786 | SEQ ID NO: 781 |

[0027] A nucleic acid comprising first and second strands that comprise, consist of, or consist essentially of a nucleoside sequence differing by 0 or 1 nucleosides from any one of the following first and second sequences:

| Unmodified first strand | Unmodified second strand |
|---|---|
| SEQ ID NO: 140 | SEQ ID NO: 260 |
| SEQ ID NO: 152 | SEQ ID NO: 272 |

[0028] A nucleic acid comprising first and second strands that comprise, consist of, or consist essentially of a nucleoside sequence differing by 0 or 1 nucleosides from any one of the following first and second sequences:

| Modified first strand | Modified second strand |
|---|---|
| SEQ ID NO: 380 | SEQ ID NO: 580 |
| SEQ ID NO: 392 | SEQ ID NO: 592 |
| SEQ ID NO: 764 | SEQ ID NO: 774 |
| SEQ ID NO: 765 | SEQ ID NO: 775 |
| SEQ ID NO: 768 | SEQ ID NO: 778 |
| SEQ ID NO: 769 | SEQ ID NO: 779 |

[0029] A nucleic acid comprising first and second strands that comprise, consist of, or consist essentially of a nucleoside sequence differing by 0 or 1 nucleosides from any one of the following first and second sequences:

| Modified first strand | Modified second strand |
|---|---|
| SEQ ID NO: 380 | SEQ ID NO: 580 |
| SEQ ID NO: 500 | SEQ ID NO: 700 |
| SEQ ID NO: 520 | SEQ ID NO: 720 |
| SEQ ID NO: 540 | SEQ ID NO: 740 |
| SEQ ID NO: 560 | SEQ ID NO: 760 |
| SEQ ID NO: 764 | SEQ ID NO: 774 |
| SEQ ID NO: 765 | SEQ ID NO: 775 |
| SEQ ID NO: 783 | SEQ ID NO: 775 |
| SEQ ID NO: 789 | SEQ ID NO: 807 |
| SEQ ID NO: 790 | SEQ ID NO: 807 |
| SEQ ID NO: 791 | SEQ ID NO: 807 |
| SEQ ID NO: 792 | SEQ ID NO: 807 |
| SEQ ID NO: 793 | SEQ ID NO: 807 |
| SEQ ID NO: 794 | SEQ ID NO: 807 |
| SEQ ID NO: 795 | SEQ ID NO: 807 |
| SEQ ID NO: 796 | SEQ ID NO: 807 |
| SEQ ID NO: 797 | SEQ ID NO: 807 |

[0030] A nucleic acid comprising first and second strands that comprise, consist of, or consist essentially of a nucleoside sequence differing by 0 or 1 nucleosides from any one of the following first and second sequences:

| Modified first strand | Modified second strand |
|---|---|
| SEQ ID NO: 764 | SEQ ID NO: 774 |
| SEQ ID NO: 789 | SEQ ID NO: 807 |
| SEQ ID NO: 790 | SEQ ID NO: 807 |
| SEQ ID NO: 791 | SEQ ID NO: 807 |
| SEQ ID NO: 792 | SEQ ID NO: 807 |
| SEQ ID NO: 793 | SEQ ID NO: 807 |
| SEQ ID NO: 794 | SEQ ID NO: 807 |
| SEQ ID NO: 795 | SEQ ID NO: 807 |
| SEQ ID NO: 796 | SEQ ID NO: 807 |
| SEQ ID NO: 797 | SEQ ID NO: 807 |

[0031] A nucleic acid comprising first and second strands that comprise, consist of, or consist essentially of a nucleoside sequence differing by 0 or 1 nucleosides from any one of the following first and second sequences:

| Modified first strand | Modified second strand |
|---|---|
| SEQ ID NO: 392 | SEQ ID NO: 592 |
| SEQ ID NO: 768 | SEQ ID NO: 778 |
| SEQ ID NO: 769 | SEQ ID NO: 779 |
| SEQ ID NO: 785 | SEQ ID NO: 779 |
| SEQ ID NO: 798 | SEQ ID NO: 808 |
| SEQ ID NO: 799 | SEQ ID NO: 808 |
| SEQ ID NO: 800 | SEQ ID NO: 808 |
| SEQ ID NO: 801 | SEQ ID NO: 808 |
| SEQ ID NO: 802 | SEQ ID NO: 808 |
| SEQ ID NO: 803 | SEQ ID NO: 808 |
| SEQ ID NO: 804 | SEQ ID NO: 808 |
| SEQ ID NO: 805 | SEQ ID NO: 808 |
| SEQ ID NO: 806 | SEQ ID NO: 808 |

[0032] A nucleic acid comprising first and second strands that comprise, consist of, or consist essentially of a nucleoside sequence differing by 0 or 1 nucleosides from any one of the following first and second sequences:

| Modified first strand | Modified second strand |
|---|---|
| SEQ ID NO: 768 | SEQ ID NO: 778 |
| SEQ ID NO: 798 | SEQ ID NO: 808 |
| SEQ ID NO: 799 | SEQ ID NO: 808 |
| SEQ ID NO: 800 | SEQ ID NO: 808 |
| SEQ ID NO: 801 | SEQ ID NO: 808 |
| SEQ ID NO: 802 | SEQ ID NO: 808 |
| SEQ ID NO: 803 | SEQ ID NO: 808 |
| SEQ ID NO: 804 | SEQ ID NO: 808 |
| SEQ ID NO: 805 | SEQ ID NO: 808 |
| SEQ ID NO: 806 | SEQ ID NO: 808 |

[0033] A nucleic acid comprising first and second strands that comprise, consist of, or consist essentially of a nucleoside sequence differing by 0 or 1 nucleosides from any one of the following first and second sequences:

| Modified first strand | Modified second strand |
|---|---|
| SEQ ID NO: 764 | SEQ ID NO: 774 |
| SEQ ID NO: 768 | SEQ ID NO: 778 |

[0034] A conjugate for inhibiting expression of HCII target gene in a cell, said conjugate comprising a nucleic acid as disclosed herein and one or more ligand moieties.

[0035] A pharmaceutical composition comprising a nucleic acid as disclosed herein, in combination with a pharmaceutically acceptable excipient or carrier.

[0036] A nucleic acid or pharmaceutical composition, for use in therapy.

[0037] A nucleic acid or pharmaceutical composition, for use in prevention or treatment of a disease related to a disorder of haemostasis, such as a disease related to a disorder of haemostasis, such as haemophilia.

### FIGURES

[0038] FIG. 1: Linker and ligand portions of constructs suitable for use according to the present invention including tether 1a. While FIG. 1 depicts the linker to be conjugated to an oligonucleotide, it is to be understood that the present invention also encompasses conjugates of the same linker with an oligonucleoside as disclosed herein.
[0039] It should also be understood that while FIG. 1 depicts as a product molecules based on the linker and ligand portions as specifically depicted in FIG. 1 attached to an oligonucleoside moiety as also depicted herein, this product may alternatively further comprise, or consist essentially of, molecules wherein the linker and ligand portions are essentially as depicted in FIG. 1 attached to an oligonucleoside moiety but having the F substituent as shown in FIG. 1 on the cyclo-octyl ring replaced by a substituent occurring as a result of hydrolytic displacement, such as an OH substituent. In this way, (a) tether 1a constructs can consist essentially of molecules having linker and ligand portions specifically as depicted in FIG. 1, with a F substituent on the cyclo-octyl ring; or (b) tether 1a constructs can consist essentially of molecules having linker and ligand portions essentially as depicted in FIG. 1 but having the F substituent as shown in FIG. 1 on the cyclo-octyl ring replaced by a substituent occurring as a result of hydrolytic displacement, such as an OH substituent, or (c) tether 1a constructs can comprise a mixture of molecules as defined in (a) and/or (b).

[0040] FIG. 2: Linker and ligand portions of constructs suitable for use according to the present invention including tether 1b. While FIG. 2 depicts the linker to be conjugated to an oligonucleotide, it is to be understood that the present invention also encompasses conjugates of the same linker with an oligonucleoside as disclosed herein.
[0041] The comments made in relation to FIG. 1 and the possible replacement of the F substituent as shown in FIG. 1 on the cyclo-octyl ring replaced by a substituent occurring as a result of hydrolytic displacement, such as an OH substituent, apply equally to tether 1b constructs. In this way, (a) tether 1b constructs can consist essentially of molecules having linker and ligand portions specifically as depicted in FIG. 2, with a F substituent on the cyclo-octyl ring; or (b) tether 1b constructs can consist essentially of molecules having linker and ligand portions essentially as depicted in FIG. 2 but having the F substituent as shown in FIG. 2 on the cyclo-octyl ring replaced by a substituent occurring as a result of hydrolytic displacement, such as an OH substituent, or (c) tether 1b constructs can comprise a mixture of molecules as defined in (a) and/or (b).

[0042] FIG. 3: Linker and ligand portions of constructs suitable for use according to the present invention including tether 2a. While FIG. 3 depicts the linker to be conjugated to an oligonucleotide, it is to be understood that the present invention also encompasses conjugates of the same linker with an oligonucleoside as disclosed herein.

[0043] FIG. 4: Linker and ligand portions of constructs suitable for use according to the present invention including tether 2b. While FIG. 4 depicts the linker to be conjugated to an oligonucleotide, it is to be understood that the present invention also encompasses conjugates of the same linker with an oligonucleoside as disclosed herein.

[0044] FIG. 5: Formulae described in Sentences 1-101 disclosed herein.

[0045] FIG. 6: Formulae described in Clauses 1-56 disclosed herein

[0046] FIGS. 7a and 7b: Inverted abasic constructs that can be used with nucleic acid sequences according to the present invention as described herein. For FIG. 7a, a galnac linker is attached to the 5′ end region of the sense strand in use (not depicted in FIG. 7a). For FIG. 7b, a galnac linker is attached to the 3′ end region of the sense strand in use (not depicted in FIG. 7b).
[0047] iaia as shown at the 3′ end region of the sense strand in FIG. 7a represents (i) two abasic nucleosides provided as the penultimate and terminal nucleosides at the 3′ end region of the sense strand, (ii) wherein a 3′-3′ reversed linkage is provided between the antepenultimate nucleoside (namely at position 21 of the sense strand, wherein position 1 is the terminal 5′ nucleoside of the sense strand) and the adjacent penultimate abasic residue of the sense strand, and (iii) the linkage between the terminal and penultimate abasic nucleosides is 5′-3′ when reading towards the 3′ end region comprising the terminal and penultimate abasic nucleosides.
[0048] iaia as shown at the 5′ end region of the sense strand in FIG. 7b represents (i) two abasic nucleosides provided as the penultimate and terminal nucleosides at the 5′ end region of the sense strand, (ii) wherein a 5′-5′ reversed linkage is provided between the antepenultimate nucleoside (namely at position 1 of the sense strand, not including the iaia motif at the 5′ end region of the sense strand in the nucleoside position numbering on the sense strand) and the adjacent penultimate abasic residue of the sense strand, and (iii) the linkage between the terminal and penultimate abasic nucleosides is 3′-5′ when reading towards the 5′ end region comprising the terminal and penultimate abasic nucleosides.

[0049] FIGS. 8a and 8b: Duplex constructs according to Table 5.

[0050] FIG. 9: Results of dose-response experiments for inhibition of HCII mRNA expression in human Huh7 cells. Points represent mean relative expression of HCII mRNA compared to untreated wells after treatment with siRNA construct at the indicated concentrations on the x-axis. Error bars represent standard deviation of the mean. Dotted curves represent 95% confidence intervals. Dotted lines and shaded areas represent the mean relative expression+/−standard deviation from untreated wells on the same plate.

[0051] FIG. 10: Change in liver HCII mRNA expression over time following subcutaneous delivery of GalNAc conjugated siRNAs in C57BL/6 mice. Data are mean+/−standard deviation, n=3 mice per timepoint.

[0052] FIG. 11: Change in liver HCII mRNA expression over time following subcutaneous delivery of GalNAc conjugated siRNAs in C57BL/6 mice. Data are mean+/−standard deviation, n=3 mice per timepoint.

### DEFINITIONS

[0053] The “first strand”, also called the antisense strand or guide strand herein and which can be used interchangeably herein, refers to the nucleic acid strand, e.g. the strand of an siRNA, e.g. a dsiRNA, which includes a region that is substantially complementary to a target sequence, e.g. to an mRNA. As used herein, the term “region of complementarity” refers to the region on the antisense strand that is substantially complementary to a sequence, for example a target sequence. Where the region of complementarity is not fully complementary to the target sequence, the mismatches can typically be in the internal or terminal regions of the molecule. In some embodiments, a double stranded nucleic acid e.g. an siRNA agent of the invention includes a nucleoside mismatch in the antisense strand.

[0054] The “second strand” (also called the sense strand or passenger strand herein, and which can be used interchangeably herein), refers to the strand of a nucleic acid e.g. siRNA that includes a region that is substantially complementary to a region of the antisense strand as that term is defined herein.

[0055] In the context of molecule comprising a nucleic acid provided with a ligand moiety, optionally also with a linker moiety, the nucleic acid of the invention may be referred to as an oligonucleoside or an oligonucleoside moiety.

[0056] Oligonucleotides are short nucleic acid polymers. Whilst oligonucleotides contain phosphodiester bonds between the nucleoside component thereof (base plus sugar), the present invention is not limited to oligonucleotides always joined by such a phosphodiester bond between adjacent nucleosides, and other oligomers of nucleosides joined by bonds which are bonds other than a phosphodiester bond are contemplated. For example, a bond between nucleosides may be a phosphorothioate bond. Therefore, the term “oligonucleoside” as used herein covers both oligonucleotides and other oligomers of nucleosides. An oligonucleoside which is a nucleic acid having at least a portion which is an oligonucleotide is preferred according to the present invention. An oligonucleoside having one or more, or a majority of, phosphodiester backbone bonds between nucleosides is also preferred according to the present invention. An oligonucleoside having one or more, or a majority of, phosphodiester backbone bonds between nucleosides, and also having one or more phosphorothioate backbone bonds between nucleosides (typically in a terminal region of the first and/or second strands) is also preferred according to the present invention.

[0057] It is preferred herein that the nucleic acid according to the invention is a double stranded oligonucleoside comprising one or more phosphorothioate backbone bonds between nucleosides. Accordingly, in all instances in which the present application refers to an oligonucleotide, particularly in the chemical structures disclosed herein, the oligonucleotide may equally be an oligonucleoside as defined herein.

[0058] In some embodiments, a double stranded nucleic acid e.g. siRNA agent of the invention includes a nucleoside mismatch in the sense strand. In some embodiments, the nucleoside mismatch is, for example, within 5, 4, 3, 2, or 1 nucleosides from the 3′-end of the nucleic acid e.g. siRNA.

[0059] In another embodiment, the nucleoside mismatch is, for example, in the 3′-terminal nucleoside of the nucleic acid e.g. siRNA.

[0060] A “target sequence” (which may also be called a target RNA or a target mRNA) refers to a contiguous portion of the nucleoside sequence of an mRNA molecule formed during the transcription of a gene, including mRNA that is a product of RNA processing of a primary transcription product.

[0061] The target sequence may be from about 10-35 nucleosides in length, e.g., about 15-30 nucleosides in length. For example, the target sequence can be from about 15-30 nucleosides, 15-29, 15-28, 15-27, 15-26, 15-25, 15-24, 15-23, 15-22, 15-21, 15-20, 15-19, 15-18, 15-17, 18-30, 18-29, 18-28, 18-27, 18-26, 18-25, 18-24, 18-23, 18-22, 18-21, 18-20, 19-30, 19-29, 19-28, 19-27, 19-26, 19-25, 19-24, 19-23, 19-22, 19-21, 19-20, 20-30, 20-29, 20-28, 20-27, 20-26, 20-25, 20-24, 20-23, 20-22, 20-21, 21-30, 21-29, 21-28, 21-27, 21-26, 21-25, 21-24, 21-23, or 21-22 nucleosides in length. Ranges and lengths intermediate to the above recited ranges and lengths are also contemplated to be part of the invention.

[0062] The term “ribonucleoside” or “nucleoside” can also refer to a modified nucleoside, as further detailed below.

[0063] A nucleic acid can be a DNA or an RNA, and can comprise modified nucleosides. RNA is a preferred nucleic acid.

[0064] The terms “iRNA”, “siRNA”, “RNAi agent,” and “iRNA agent,” “RNA interference agent” as used interchangeably herein, refer to an agent that contains RNA, and which mediates the targeted cleavage of an RNA transcript via an RNA-induced silencing complex (RISC) pathway. siRNA directs the sequence-specific degradation of mRNA through RNA interference (RNAi).

[0065] A double stranded RNA is referred to herein as a “double stranded siRNA (dsiRNA) agent”, “double stranded siRNA (dsiRNA) molecule”, “double stranded RNA (dsRNA) agent”, “double stranded RNA (dsRNA) molecule”, “dsiRNA agent”, “dsiRNA molecule”, or “dsiRNA”, which refers to a complex of ribonucleic acid molecules, having a duplex structure comprising two anti-parallel and substantially complementary nucleic acid strands, referred to as having “sense” and “antisense” orientations with respect to a target RNA.

[0066] The majority of nucleosides of each strand of the nucleic acid, e.g. a dsiRNA molecule, are preferably ribonucleosides, but in that case each or both strands can also include one or more non-ribonucleosides, e.g., a deoxyribonucleoside or a modified nucleoside. In addition, as used in this specification, an “siRNA” may include ribonucleosides with chemical modifications.

[0067] The term “modified nucleoside” refers to a nucleoside having, independently, a modified sugar moiety, a modified internucleoside linkage, or modified nucleobase, or any combination thereof. Thus, the term modified nucleoside encompasses substitutions, additions or removal of, e.g., a functional group or atom, to internucleoside linkages, sugar moieties, or nucleobases. Any such modifications, as used in an siRNA type molecule, are encompassed by “iRNA” or “RNAi agent” or “siRNA” or “siRNA agent” for the purposes of this specification and claims.

[0068] The two strands forming the duplex structure may be different portions of one larger molecule, or they may be separate molecules e.g. RNA molecules.

[0069] The term “nucleoside overhang” refers to at least one unpaired nucleoside that extends from the duplex structure of a nucleic acid according to the present invention. A nucleic acid according to the present invention can comprise an overhang of at least one nucleoside; alternatively the overhang can comprise at least two nucleosides, at least three nucleosides, at least four nucleosides, at least five nucleosides or more. A nucleoside overhang can comprise or consist of a nucleoside/nucleoside analog, including a deoxynucleoside. The overhang(s) can be on the sense strand, the antisense strand, or any combination thereof. Furthermore, the nucleoside(s) of an overhang can be present on the 5′-end, 3′-end, or both ends of either an antisense or sense strand.

[0070] In certain embodiments, the antisense strand has a 1-10 nucleoside, e.g., 0-3, 1-3, 2-4, 2-5, 4-10, 5-10, 1, 2, 3, 4, 5, 6, 7, 8, 9, or 10 nucleoside, overhang at the 3′-end or the 5′-end.

[0071] “Blunt” or “blunt end” means that there are no unpaired nucleosides at that end of the double stranded nucleic acid, i.e., no nucleoside overhang. The nucleic acids of the invention include those with no nucleoside overhang at one end or with no nucleoside overhangs at either end.

[0072] Unless otherwise indicated, the term “complementary,” when used to describe a first nucleoside sequence in relation to a second nucleoside sequence, refers to the ability of an oligonucleoside comprising the first nucleoside sequence to hybridize and form a duplex structure under certain conditions with an oligonucleoside comprising the second nucleoside sequence, as will be understood by the skilled person. Such conditions can, for example, be stringent conditions, where stringent conditions can include: 400 mM NaCl, 40 mM PIPES pH 6.4, 1 mM EDTA, 50° C. or 70° C. for 12-16 hours followed by washing (see, e.g., “Molecular Cloning: A Laboratory Manual, Sambrook, et al. (1989) Cold Spring Harbor Laboratory Press).

[0073] Complementary sequences within nucleic acid e.g. a dsiRNA, as described herein, include base-pairing of the oligonucleoside comprising a first nucleoside sequence to an oligonucleoside comprising a second nucleoside sequence over the entire length of one or both nucleoside sequences. Such sequences can be referred to as “fully complementary” with respect to each other herein. However, where a first sequence is referred to as “substantially complementary” or “partially complementary” with respect to a second sequence herein, the two sequences can be fully complementary, or they can form one or more mismatched base pairs, such as 2, 4, or 5 mismatched base pairs, but preferably not more than 5, while retaining the ability to hybridize under the conditions most relevant to their ultimate application, e.g., inhibition of gene expression via a RISC pathway. Overhangs shall not be regarded as mismatches with regard to the determination of complementarity. For example, a nucleic acid e.g. dsiRNA comprising one oligonucleoside 17 nucleosides in length and another oligonucleoside 19 nucleosides in length, wherein the longer oligonucleoside comprises a sequence of 17 nucleosides that is fully complementary to the shorter oligonucleoside, can yet be referred to as “fully complementary”.

[0074] “Complementary” sequences, as used herein, can also include, or be formed entirely from, non-Watson-Crick base pairs or base pairs formed from non-natural and modified nucleosides, in so far as the above requirements with respect to their ability to hybridize are fulfilled. Such non-Watson-Crick base pairs include, but are not limited to, G: U Wobble or Hoogstein base pairing.

[0075] The terms “complementary,” “fully complementary” and “substantially/partially complementary” herein can be used with respect to the base matching between the sense strand and the antisense strand of a nucleic acid eg dsiRNA, or between the antisense strand of a double stranded nucleic acid e.g. siRNA agent and a target sequence.

[0076] Within the present invention, the second strand of the nucleic acid according to the invention, in particular a dsiRNA for inhibiting HCII, is at least partially complementary to the first strand of said nucleic acid. In certain embodiments, a first and second strand of a nucleic acid according to the invention are partially complementary if they form a duplex region having a length of at least 17 base pairs and comprising not more than 1, 2, 3, 4, or 5 mismatched base pairs.

[0077] In certain embodiments, a first and second strand of the nucleic acid according to the invention are partially complementary if they form a duplex region having a length of 19 base pairs and comprising not more than 1, 2, 3, 4, or 5 mismatched base pairs. In certain embodiments, a first and second strand of the nucleic acid according to the invention are partially complementary if they form a duplex region having a length of 21 base pairs comprising not more than 1, 2, 3, 4, or 5 mismatched base pairs.

[0078] Alternatively, a first and second strand of the nucleic acid according to the invention are partially complementary if they form a duplex region having a length of at least 17 base pairs, wherein at least 14, 15, 16 or 17 of said base pairs are complementary base pairs, in particular Watson-Crick base pairs.

[0079] In certain embodiments, a first and second strand of the nucleic acid according to the invention are partially complementary if they form a duplex region having a length of 19 base pairs, wherein at least 14, 15, 16, 17, 18 or all 19 base pairs are complementary base pairs, in particular Watson-Crick base pairs. In certain embodiments, a first and second strand of the nucleic acid according to the invention are partially complementary if they form a duplex region having a length of 21 base pairs, wherein at least 16, 17, 18, 19, 20 or all 21 base pairs are complementary base pairs, in particular Watson-Crick base pairs.

[0080] As used herein, a nucleic acid that is “substantially complementary” or “partially complementary” to at least part of a messenger RNA (mRNA) refers to a nucleic acid that is substantially or partially complementary to a contiguous portion of the mRNA of interest (e.g., an mRNA encoding a gene). In certain embodiments, the contiguous portion of the mRNA is a sequence as listed in Table 1, i.e., any one of SEQ ID NOs: 2-121. For example, a nucleic acid is complementary to at least a part of an mRNA of a gene of interest if the sequence is substantially or partially complementary to a non-interrupted portion of an mRNA encoding that gene.

[0081] Accordingly, in some preferred embodiments, the antisense oligonucleosides as disclosed herein are fully complementary to the target gene sequence.

[0082] In other embodiments, the antisense oligonucleosides disclosed herein are substantially or partially complementary to a target RNA sequence and comprise a contiguous nucleoside sequence which is at least about 80% complementary over its entire length to the equivalent region of the target RNA sequence, such as at least about 85%, 86%, 87%, 88%, 89%, about 90%, 91%, 92%, 93%, 94%, 95%, 96%, 97%, 98%, or 99% complementary or 100% complementary.

[0083] In certain embodiments, the first (antisense) strand of a nucleic acid according to the invention is partially or fully complementary to a contiguous portion of RNA transcribed from the HCII gene. In certain embodiments, the first strand of the nucleic acid according to the invention is partially or fully complementary to a contiguous portion of at least 17 nucleosides of the HCII mRNA. In certain embodiments, the first strand of the nucleic acid according to the invention is partially or fully complementary to a contiguous portion of 17, 18, 19, 20, 21, 22 or 23 nucleosides of the HCII mRNA. In certain embodiments, the first strand of the nucleic acid according to the invention is partially or fully complementary to a contiguous portion of 17, 18, 19, 20, 21, 22 or 23 nucleosides of any one of the sequences as listed in Table 1, i.e., any one of SEQ ID NOs: 2-121.

[0084] In certain embodiments, the first (antisense) strand of the nucleic acid according to the invention is partially complementary to a contiguous portion of the HCII mRNA if it comprises a contiguous nucleoside sequence of at least 17 nucleosides, wherein at least 14, 15, 16 or 17 nucleosides of said contiguous nucleoside sequence are complementary to a contiguous portion of the HCII mRNA. In certain embodiments, the first strand of the nucleic acid according to the invention comprises a contiguous nucleoside sequence of at least 17 nucleosides, wherein at least 14, 15, 16 or 17 nucleosides of said contiguous nucleoside sequence are complementary to a contiguous portion of any one of the sequences listed in Table 1, i.e., any one of SEQ ID NOs: 2-121. In certain embodiments, the first strand of the nucleic acid according to the invention comprises a contiguous nucleoside sequence of 19 nucleosides, wherein at least 14, 15, 16, 17, 18 or all 19 nucleosides of said contiguous nucleoside sequence are complementary to a contiguous portion of any one of the sequences listed in Table 1, i.e., any one of SEQ ID NOs: 2-121. In certain embodiments, the first strand of the nucleic acid according to the invention comprises a contiguous nucleoside sequence of 23 nucleosides, wherein at least 18, 19, 20, 21, 22 or all 23 nucleosides of said contiguous nucleoside sequence are complementary to a contiguous portion of any one of the sequences listed in Table 1, i.e., any one of SEQ ID NOs: 2-101.

[0085] In some embodiments, a nucleic acid e.g. an siRNA of the invention includes a sense strand that is substantially or partially complementary to an antisense oligonucleoside which, in turn, is complementary to a target gene sequence and comprises a contiguous nucleoside sequence. The nucleoside sequence of the sense strand is typically at least about 80% complementary over its entire length to the equivalent region of the nucleoside sequence of the antisense strand, such as about 85%, 86%, 87%, 88%, 89%, 90%, 91%, 92%, 93%, 94%, 95%, 96%, 97%, 98%, or 99% complementary, or 100% complementary.

[0086] In some embodiments, a nucleic acid e.g. an siRNA of the invention includes an antisense strand that is substantially or partially complementary to the target sequence and comprises a contiguous nucleoside sequence which is at least 80% complementary over its entire length to the target sequence such as about 85%, 86%, 87%, 88%, 89%, 90%, 91%, 92%, 93%, 94%, 95%, 96%, 97%, 98%, or 99% complementary, or 100% complementary.

[0087] As used herein, a “subject” is an animal, such as a mammal, including a primate (such as a human, a non-human primate, e.g., a monkey, and a chimpanzee), or a non-primate or a bird that expresses the target gene, either endogenously or heterologously, when the target gene sequence has sufficient complementarity to the nucleic acid e.g. siRNA agent to promote target knockdown. In certain preferred embodiments, the subject is a human.

[0088] The terms “treating” or “treatment” refer to a beneficial or desired result including, but not limited to, alleviation or amelioration of one or more symptoms associated with gene expression. “Treatment” can also mean prolonging survival as compared to expected survival in the absence of treatment. Treatment can include prevention of development of co-morbidities, e.g., reduced liver damage in a subject with a hepatic infection.

[0089] “Therapeutically effective amount,” as used herein, is intended to include the amount of a nucleic acid e.g. an siRNA that, when administered to a patient for treating a subject having disease, is sufficient to effect treatment of the disease (e.g., by diminishing, ameliorating or maintaining the existing disease or one or more symptoms of disease or its related comorbidities).

[0090] The phrase “pharmaceutically acceptable” is employed herein to refer to compounds, materials, compositions, or dosage forms which are suitable for use in contact with the tissues of human subjects and animal subjects without excessive toxicity, irritation, allergic response, or other problem or complication, commensurate with a reasonable benefit/risk ratio.

[0091] The phrase “pharmaceutically-acceptable carrier” as used herein means a pharmaceutically-acceptable material, composition, or vehicle, such as a liquid or solid filler, diluent, excipient, manufacturing aid or solvent encapsulating material, involved in carrying or transporting the subject compound from one organ, or portion of the body, to another organ, or portion of the body. Each carrier must be “acceptable” in the sense of being compatible with the other ingredients of the formulation and not injurious to the subject being treated.

[0092] Where a value or range of values of a parameter are recited, it is intended that values and ranges intermediate to the recited values are also intended to be part of this invention.

[0093] The articles “a” and “an” are used herein to refer to one or to more than one (i.e. to at least one) of the grammatical object of the article.

[0094] The term “including” is used herein to mean, and is used interchangeably with, the phrase “including but not limited to”.

[0095] The term “or” is used herein to mean, and is used interchangeably with, the term “and/or,” unless context clearly indicates otherwise. For example, “sense strand or antisense strand” is understood as “sense strand or antisense strand or sense strand and antisense strand.”

[0096] The term “about” is used herein to mean within the typical ranges of tolerances in the art. For example, “about” can be understood as about 2 standard deviations from the mean. In certain embodiments, about means +10%. In certain embodiments, about means +5%. When about is present before a series of numbers or a range, it is understood that “about” can modify each of the numbers in the series or range.

[0097] The term “at least” prior to a number or series of numbers is understood to include the number adjacent to the term “at least”, and all subsequent numbers or integers that could logically be included, as clear from context. For example, the number of nucleosides in a nucleic acid molecule must be an integer. For example, “at least 18 nucleosides of a 21 nucleoside nucleic acid molecule” means that 18, 19, 20, or 21 nucleosides have the indicated property. When at least is present before a series of numbers or a range, it is understood that “at least” can modify each of the numbers in the series or range.

[0098] As used herein, “no more than” or “less than” is understood as the value adjacent to the phrase and logical lower values or integers, as logical from context, to zero. For example, a duplex with an overhang of “no more than 2 nucleosides” has a 2, 1, or 0 nucleoside overhang. When “no more than” is present before a series of numbers or a range, it is understood that “no more than” can modify each of the numbers in the series or range.

[0099] The terminal region of a strand is the last 5 nucleosides from the 5′ or the 3′ end.

[0100] Various embodiments of the invention can be combined as determined appropriate by one of skill in the art.

### Abasic Nucleosides

[0101] In certain embodiments, there are 1, e.g. 2, e.g. 3, e.g. 4 or more abasic nucleosides present in nucleic acids according to the present invention. Abasic nucleosides are modified nucleosides because they lack the base normally seen at position 1 of the sugar moiety. Typically, there will be a hydrogen at position 1 of the sugar moiety of the abasic nucleosides present in a nucleic acid according to the present invention.

[0102] The abasic nucleosides are in the terminal region of the second strand, preferably located within the terminal 5 nucleosides of the end of the strand. The terminal region may be the terminal 5 nucleosides, which includes abasic nucleosides.

[0103] The second strand may comprise, as preferred features (which are all specifically contemplated in combination unless mutually exclusive):
[0104] 2, or more than 2, abasic nucleosides in a terminal region of the second strand; and/or
[0105] 2, or more than 2, abasic nucleosides in either the 5′ or 3′ terminal region of the second strand; and/or
[0106] 2, or more than 2, abasic nucleosides in either the 5′ or 3′ terminal region of the second strand, wherein the abasic nucleosides are present in an overhang as herein described; and/or
[0107] 2, or more than 2, consecutive abasic nucleosides in a terminal region of the second strand, wherein preferably one such abasic nucleoside is a terminal nucleoside; and/or
[0108] 2, or more than 2, consecutive abasic nucleosides in either the 5′ or 3′ terminal region of the second strand, wherein preferably one such abasic nucleoside is a terminal nucleoside in either the 5′ or 3′ terminal region of the second strand; and/or
[0109] a reversed internucleoside linkage connects at least one abasic nucleoside to an adjacent basic nucleoside in a terminal region of the second strand; and/or
[0110] a reversed internucleoside linkage connects at least one abasic nucleoside to an adjacent basic nucleoside in either the 5′ or 3′ terminal region of the second strand; and/or
[0111] an abasic nucleoside as the penultimate nucleoside which is connected via the reversed linkage to the nucleoside which is not the terminal nucleoside (called the antepenultimate nucleoside herein); and/or
[0112] abasic nucleosides as the 2 terminal nucleosides connected via a 5′-3′ linkage when reading the strand in the direction towards the terminus comprising the terminal nucleosides;
[0113] abasic nucleosides as the 2 terminal nucleosides connected via a 3′-5′ linkage when reading the strand in the direction towards the terminus comprising the terminal nucleosides;
[0114] abasic nucleosides as the terminal 2 positions, wherein the penultimate nucleoside is connected via the reversed linkage to the antepenultimate nucleoside, and wherein the reversed linkage is a 5-5′ reversed linkage or a 3′-3′ reversed linkage;
[0115] abasic nucleosides as the terminal 2 positions, wherein the penultimate nucleoside is connected via the reversed linkage to the antepenultimate nucleoside, and wherein either
[0116] (1) the reversed linkage is a 5-5′ reversed linkage and the linkage between the terminal and penultimate abasic nucleosides is 3′5′ when reading towards the terminus comprising the terminal and penultimate abasic nucleosides; or
[0117] (2) the reversed linkage is a 3-3′ reversed linkage and the linkage between the terminal and penultimate abasic nucleosides is 5′3′ when reading towards the terminus comprising the terminal and penultimate abasic nucleosides.

[0118] Preferably there is an abasic nucleoside at the terminus of the second strand.

[0119] Preferably there are 2 or at least 2 abasic nucleosides in the terminal region of the second strand, preferably at the terminal and penultimate positions.

[0120] Preferably 2 or more abasic nucleosides are consecutive, for example all abasic nucleosides may be consecutive. For example, the terminal 1 or terminal 2 or terminal 3 or terminal 4 nucleosides may be abasic nucleosides.

[0121] An abasic nucleoside may also be linked to an adjacent nucleoside through a 5′-3′ phosphodiester linkage or reversed linkage unless there is only 1 abasic nucleoside at the terminus, in which case it will have a reversed linkage to the adjacent nucleoside.

[0122] A reversed linkage (which may also be referred to as an inverted linkage, which is also seen in the art), comprises either a 5′-5′, a 3′3′, a 3′-2′ or a 2′-3′ phosphodiester linkage between the adjacent sugar moieties of the nucleosides.

[0123] Abasic nucleosides which are not terminal will have 2 phosphodiester bonds, one with each adjacent nucleoside, and these may be a reversed linkage or may be a 5′-3 phosphodiester bond or may be one of each.

[0124] A preferred embodiment comprises 2 abasic nucleosides at the terminal and penultimate positions of the second strand, and wherein the reversed internucleoside linkage is located between the penultimate (abasic) nucleoside and the antepenultimate nucleoside.

[0125] Preferably there are 2 abasic nucleosides at the terminal and penultimate positions of the second strand and the penultimate nucleoside is linked to the antepenultimate nucleoside through a reversed internucleoside linkage and is linked to the terminal nucleoside through a 5′-3′ or 3′-5′ phosphodiester linkage (reading in the direction of the terminus of the molecule).

[0126] Preferably a nucleic acid according to the present invention comprises one or more abasic nucleosides, optionally wherein the one or more abasic nucleosides are in a terminal region of the second strand, and/or wherein at least one abasic nucleoside is linked to an adjacent basic nucleoside through a reversed internucleoside linkage.

[0127] Typically the second strand comprises 2 consecutive abasic nucleosides in the 5′ terminal region of the second strand, wherein one such abasic nucleoside is a terminal nucleoside at the 5′ terminal region of the second strand and the other abasic nucleoside is a penultimate nucleoside at the 5′ terminal region of the second strand, wherein: (a) said penultimate abasic nucleoside is connected to an adjacent first basic nucleoside in an adjacent 5′ near terminal region through a reversed internucleoside linkage; and (b) the reversed linkage is a 5-5′ reversed linkage; and (c) the linkage between the terminal and penultimate abasic nucleosides is 3′5′ when reading towards the terminus comprising the terminal and penultimate abasic nucleosides. More typically, (i) the first strand and the second strand each has a length of 23 nucleosides; (ii) two phosphorothioate internucleoside linkages are respectively between three consecutive positions in said 5′ near terminal region of the second strand, wherein a first phosphorothioate internucleoside linkage is present between said adjacent first basic nucleoside of (a) and an adjacent second basic nucleoside in said 5′ near terminal region of the second strand, and a second phosphorothioate internucleoside linkage is present between said adjacent second basic nucleoside and an adjacent third basic nucleoside in said 5′ near terminal region of the second strand; (iii) two phosphorothioate internucleoside linkages are respectively between three consecutive positions in both 5′ and 3′ terminal regions of the first strand, whereby a terminal nucleoside respectively at each of the 5′ and 3′ terminal regions of said first strand is each attached to a respective 5′ and 3′ adjacent penultimate nucleoside by a phosphorothioate internucleoside linkage, and each first 5′ and 3′ penultimate nucleoside is attached to a respective 5′ and 3′ adjacent antepenultimate nucleoside by a phosphorothioate internucleoside linkage; and (iv) the second strand of the nucleic acid is conjugated directly or indirectly to one or more ligand moieties at the 3′ terminal region of the second strand.

[0128] Alternatively the second strand comprises 2 consecutive abasic nucleosides preferably in an overhang in the 3′ terminal region of the second strand, wherein one such abasic nucleoside is a terminal nucleoside at the 3′ terminal region of the second strand and the other abasic nucleoside is a penultimate nucleoside at the 3′ terminal region of the second strand, wherein: (a) said penultimate abasic nucleoside is connected to an adjacent first basic nucleoside in an adjacent 3′ near terminal region through a reversed internucleoside linkage; and (b) the reversed linkage is a 3-3′ reversed linkage; and (c) the linkage between the terminal and penultimate abasic nucleosides is 5′-3′ when reading towards the terminus comprising the terminal and penultimate abasic nucleosides. More typically, (1) the first strand and the second strand each has a length of 23 nucleosides; (ii) two phosphorothioate internucleoside linkages are respectively between three consecutive positions in said 3′ near terminal region of the second strand, wherein a first phosphorothioate internucleoside linkage is present between said adjacent first basic nucleoside of (a) and an adjacent second basic nucleoside in said 3′ near terminal region of the second strand, and a second phosphorothioate internucleoside linkage is present between said adjacent second basic nucleoside and an adjacent third basic nucleoside in said 3′ near terminal region of the second strand; (iii) two phosphorothioate internucleoside linkages are respectively between three consecutive positions in both 5′ and 3′ terminal regions of the first strand, whereby a terminal nucleoside respectively at each of the 5′ and 3′ terminal regions of said first strand is each attached to a respective 5′ and 3′ adjacent penultimate nucleoside by a phosphorothioate internucleoside linkage, and each first 5′ and 3′ penultimate nucleoside is attached to a respective 5′ and 3′ adjacent antepenultimate nucleoside by a phosphorothioate internucleoside linkage; and (iv) the second strand of the nucleic acid is conjugated directly or indirectly to one or more ligand moieties at the 5′ terminal region of the second strand.

[0129] Examples of the structures are as follows (where the specific RNA nucleosides shown are not limiting and could be any RNA nucleoside):
[0130] A A 3′-3′ reversed bond (and also showing the 5′-3 direction of the last phosphodiester bond between the two abasic molecules reading towards the terminus of the molecule)

[chemical structure]

[0131] B Illustrating a 5′-5′ reversed bond (and also showing the 3′-5′ direction of the last phosphodiester bond between the two abasic molecules reading towards the terminus of the molecule)

[chemical structure]

[0132] The abasic nucleoside or abasic nucleosides present in the nucleic acid are provided in the presence of a reversed internucleoside linkage or linkages, namely a 5′-5′ or a 3′-3′ reversed internucleoside linkage. A reversed linkage occurs as a result of a change of orientation of an adjacent nucleoside sugar, such that the sugar will have a 3′-5′ orientation as opposed to the conventional 5′-3′ orientation (with reference to the numbering of ring atoms on the nucleoside sugars). The abasic nucleoside or nucleosides as present in the nucleic acids of the invention preferably include such inverted nucleoside sugars.

[0133] In the case of a terminal nucleoside having an inverted orientation, then this will result in an “inverted” end configuration for the overall nucleic acid. Whilst certain structures drawn and referenced herein are represented using conventional 5′-3′ direction (with reference to the numbering of ring atoms on the nucleoside sugars), it will be appreciated that the presence of a terminal nucleoside having a change of orientation and a proximal 3′-3′ reversed linkage, will result in a nucleic acid having an overall 5′-5′ end structure (i.e. the conventional 3′ end nucleoside becomes a 5′ end nucleoside). Alternatively, it will be appreciated that the presence of a terminal nucleoside having a change of orientation and a proximal 5′-5′ reversed linkage will result in a nucleic acid with an overall 3′-3′ end structure.

[0134] The proximal 3′-3′ or 5′-5′ reversed linkage as herein described, may comprise the reversed linkage being directly adjacent/attached to a terminal nucleoside having an inverted orientation, such as a single terminal nucleoside having an inverted orientation. Alternatively, the proximal 3′-3′ or 5′-5′ reversed linkage as herein described, may comprise the reversed linkage being adjacent 2, or more than 2, nucleosides having an inverted orientation, such as 2, or more than 2, terminal region nucleosides having an inverted orientation, such as the terminal and penultimate nucleosides. In this way, the reversed linkage may be attached to a penultimate nucleoside having an inverted orientation. While a skilled addressee will appreciate that inverted orientations as described above can result in nucleic acid molecules having overall 3′-3′ or 5′-5′ end structures as described herein, it will also be appreciated that with the presence of one or more additional reversed linkages and/or nucleosides having an inverted orientation, then the overall nucleic acid may have 3′-5′ end structures corresponding to the conventionally positioned 5′/3′ ends.

[0135] In one aspect the nucleic acid may have a 3′-3′ reversed linkage, and the terminal sugar moiety may comprise a 5′ OH rather than a 5′ phosphate group at the 5′ position of that terminal sugar.

[0136] A skilled person would therefore clearly understand that 5′-5′, 3′-3′ and 3′-5′ (reading in the direction of that terminus) end variants of the more conventional 5′-3′ structures (with reference to the numbering of ring atoms on the end nucleoside sugars) drawn herein are included in the scope of the disclosure, where a reversed linkage or linkages is/are present.

[0137] In the situation of eg a reversed internucleoside linkage and/or one or more nucleosides having an inverted orientation creating an inverted end, and where the relative position of a linkage (eg to a linker) or the location of an internal feature (such as a modified nucleoside) is defined relative to the 5′ or 3′ end of the nucleic acid, then the 5′ or 3′ end is the conventional 5′ or 3′ end which would have existed had a reversed linkage not been in place, and wherein the conventional 5′ or 3′ end is determined by consideration of the directionality of the majority of the internal nucleoside linkages and/or nucleoside orientation within the nucleic acid. It is possible to tell from these internal bonds and/or nucleoside orientation which ends of the nucleic acid would constitute the conventional 5′ and 3′ ends (with reference to the numbering of ring atoms on the end nucleoside sugars) of the molecule absent the reversed linkage.

[0138] For example, in the structure shown below there are abasic residues in the first 2 positions located at the 5′ end. Where the terminal nucleoside has an inverted orientation then the 5′ end indicated in the diagram below, which is the conventional 5′ end, can in fact comprise a 3′ OH in view of the inverted nucleoside at the terminal position. Nevertheless the majority of the molecule will comprise conventional internucleoside linkages that run from the 3′ OH of the sugar to the 5′ phosphate of the next sugar, when reading in the standard 5′ [PO4] to 3′ [OH] direction of a nucleic acid molecule (with reference to the numbering of ring atoms on the nucleoside sugars), which can be used to determine the conventional 5′ and 3′ ends that would be found absent the inverted end configuration.

5′ A-A-Me-Me-Me-Me-Me-Me-F-Me-F-F-F-Me-Me-Me-Me-
Me-Me-Me-Me-Me-Me 3′

[0139] In some embodiments, the second (sense) strand of the nucleic acid according to the invention comprises 2 consecutive abasic nucleosides in the 5′ terminal region as shown in the following 5′ terminal motif

[chemical structure]

[0140] wherein:
[0141] B represents a nucleoside base,
[0142] T represent H, OH or a 2′ ribose modification,
[0143] Z represents the remaining nucleosides of said second strand.

[0144] In some embodiments, the second (sense) strand of the nucleic acid according to the invention comprises 2 consecutive abasic nucleosides in the 5′ terminal region as shown in the following 5′ terminal motif

[chemical structure]

[0145] wherein:
[0146] B represents a nucleoside base,
[0147] T represents H, OH or a 2′ ribose modification (preferably a 2′ ribose modification, more preferably a 2′Me or 2′F ribose modification),
[0148] V represents O or S (preferably O),
[0149] R represents H or C₁₋₄ alkyl (preferably H),
[0150] Z represents the remaining nucleosides of said second strand,
[0151] more preferably the following 5′ terminal motif

[chemical structure]

[0152] wherein:
[0153] B represents a nucleoside base,
[0154] T represents a 2′ ribose modification (preferably a 2′Me or 2′F ribose modification),
[0155] Z represents the remaining nucleosides of said second strand.

[0156] The reversed bond is preferably located at the end of the nucleic acid eg RNA which is distal to a ligand moiety, such as a GalNAc containing portion, of the molecule.

[0157] GalNAc-siRNA constructs with a 5′-GalNAc on the sense strand can have a reversed linkage on the opposite end of the sense strand.

[0158] GalNAc-siRNA constructs with a 3′-GalNAc on the sense strand can have a reversed linkage on the opposite end of the sense strand.

[0159] In a preferred embodiment, the second (sense) strand of the nucleic acid according to the invention comprises 2 consecutive abasic nucleosides in the 5′ terminal region as shown in the following 5′ terminal motif

[chemical structure]

[0160] wherein:
[0161] B represents a nucleoside base,
[0162] T represent H, OH or a 2′ ribose modification (preferably a 2′ ribose modification, more preferably a 2′Me or 2′F ribose modification),
[0163] V represent O or S (preferably O),
[0164] R represent H or C₁₋₄ alkyl (preferably H),
[0165] Z comprises 11 to 26 contiguous nucleosides, preferably 15 to 21 contiguous nucleosides, and more preferably 19 contiguous nucleosides,
[0166] more preferably the following 5′ terminal motif

[chemical structure]

[0167] wherein:
[0168] B represents a nucleoside base,
[0169] T represents a 2′ ribose modification (preferably a 2′Me or 2′F ribose modification),
[0170] Z comprises 19 contiguous nucleosides.

### Nucleic Acid Lengths

[0171] In one aspect the i) the first strand of the nucleic acid has a length in the range of 17 to 30 nucleosides, preferably 19 to 25 nucleosides, more preferably 19 or 23 nucleosides; and/or ii) the second strand of the nucleic acid has a length in the range of 17 to 30 nucleosides, preferably 19 to 25 nucleosides, more preferably 19 or 21 nucleosides.

[0172] Typically the duplex region of the nucleic acid is between 17 and 30 nucleosides in length, more preferably is 19 or 21 nucleosides in length. Similarly, the region of complementarity between the first strand and the portion of RNA transcribed from the HCII gene is between 17 and 30 nucleosides in length.

### Nucleic Acid Modifications

[0173] In certain embodiments, the nucleic acid e.g. an RNA of the invention e.g., a dsiRNA, does not comprise further modifications e.g., chemical modifications or conjugations known in the art and described herein.

[0174] In other preferred embodiments, the nucleic acid e.g. RNA of the invention, e.g., a dsiRNA, is further chemically modified to enhance stability or other beneficial characteristics.

[0175] In certain embodiments of the invention, substantially all of the nucleosides are modified.

[0176] The nucleic acids featured in the invention can be synthesized or modified by methods well established in the art, such as those described in “Current protocols in nucleic acid chemistry,” Beaucage, S. L. et al. (Edrs.), John Wiley & Sons, Inc., New York, NY, USA, which is hereby incorporated herein by reference.

[0177] Modifications include, for example, end modifications, e.g., 5′-end modifications (phosphorylation, conjugation, inverted linkages) or 3′-end modifications (conjugation, DNA nucleosides within an RNA, or RNA nucleosides within a DNA, inverted linkages, etc.); base modifications, e.g., replacement with stabilizing bases, destabilizing bases, or bases that base pair with an expanded repertoire of partners, conjugated bases; sugar modifications (e.g., at the 2′-position or 4′-position) or replacement of the sugar; or backbone modifications, including modification or replacement of the phosphodiester linkages.

[0178] Specific examples of nucleic acids such as siRNA compounds useful in the embodiments described herein include, but are not limited to RNAs containing modified backbones or no natural internucleoside linkages. Nucleic acids such as RNAs having modified backbones include, among others, those that do not have a phosphorus atom in the backbone. For the purposes of this specification, and as sometimes referenced in the art, modified nucleic acids e.g. RNAs that do not have a phosphorus atom in their internucleoside backbone can also be considered to be oligonucleosides. In some embodiments, a modified nucleic acid e.g. an siRNA will have a phosphorus atom in its internucleoside backbone.

[0179] Modified nucleic acid e.g. RNA backbones include, for example, phosphorothioates, chiral phosphorothioates, phosphorodithioates, phosphotriesters, aminoalkylphosphotriesters, methyl and other alkyl phosphonates including 3′-alkylene phosphonates and chiral phosphonates, phosphinates, phosphoramidates including 3′-amino phosphoramidate and aminoalkylphosphoramidates, thionophosphoramidates, thionoalkylphosphonates, thionoalkylphosphotriesters, and boranophosphates having normal 3′-5′ linkages, 2′-5′-linked analogs of these, and those having inverted polarity wherein the adjacent pairs of nucleoside units are linked 5′-3′ or 5′-2′. Various salts, mixed salts and free acid forms are also included.

[0180] Modified nucleic acids e.g. RNAs can also contain one or more substituted sugar moieties. The nucleic acids e.g. siRNAs, e.g., dsiRNAs, featured herein can include one of the following at the 2′-position: OH; F; O-, S-, or N-alkyl; O-, S-, or N-alkenyl; O-, S- or N-alkynyl; or O-alkyl-O-alkyl, wherein the alkyl, alkenyl and alkynyl can be substituted or unsubstituted. 2′ O-methyl and 2′-F are preferred modifications.

[0181] In certain preferred embodiments, the nucleic acid comprises at least one modified nucleoside.

[0182] The nucleic acid of the invention may comprise one or more modified nucleosides on the first strand and/or the second strand.

[0183] In some embodiments, substantially all of the nucleosides of the sense strand and all of the nucleosides of the antisense strand comprise a modification.

[0184] In some embodiments, all of the nucleosides of the sense strand and substantially all of the nucleosides of the antisense strand comprise a modification.

[0185] In some embodiments, all of the nucleosides of the sense strand and all of the nucleosides of the antisense strand comprise a modification.

[0186] In one embodiment, at least one of the modified nucleosides is selected from the group consisting of a deoxy-nucleoside, a 3′-terminal deoxy-thymine (dT) nucleoside, a 2′-O-methyl modified nucleoside (also called herein 2′-Me, where Me is a methoxy), a 2′-fluoro modified nucleoside, a 2′-deoxy-modified nucleoside, a locked nucleoside, an unlocked nucleoside, a conformationally restricted nucleoside, a constrained ethyl nucleoside, an abasic nucleoside, a 2′-amino-modified nucleoside, a 2′-O-allyl-modified nucleoside, 2′-O-alkyl-modified nucleoside, 2′-hydroxyl-modified nucleoside, a 2′-methoxyethyl modified nucleoside, a 2′-O-alkyl-modified nucleoside, a morpholino nucleoside, a phosphoramidate, a non-natural base comprising nucleoside, a tetrahydropyran modified nucleoside, a 1,5-anhydrohexitol modified nucleoside, a cyclohexenyl modified nucleoside, a nucleoside comprising a phosphorothioate group, a nucleoside comprising a methylphosphonate group, a nucleoside comprising a 5′-phosphate, and a nucleoside comprising a 5′-phosphate mimic. In another embodiment, the modified nucleosides comprise a short sequence of 3′-terminal deoxy-thymine nucleosides (dT).

[0187] Modifications on the nucleosides may preferably be selected from the group including, but not limited to, LNA, HNA, CeNA, 2′-methoxyethyl, 2′-O-alkyl, 2′-O-allyl, 2′-C-allyl, 2′-fluoro, 2′-deoxy, 2′-hydroxyl, and combinations thereof. In another embodiment, the modifications on the nucleosides are 2′-O-methyl (“2′-Me”) or 2′-fluoro modifications.

[0188] One preferred modification is a modification at the 2′-OH group of the ribose sugar, optionally selected from 2′-Me or 2′-F modifications.

[0189] Preferred nucleic acid comprise one or more nucleosides on the first strand and/or the second strand which are modified, to form modified nucleosides, as follows:

[0190] A nucleic acid wherein the modification is a modification at the 2′-OH group of the ribose sugar, optionally selected from 2′-Me or 2′-F modifications.

[0191] A nucleic acid wherein the first strand comprises a 2′-F modification at any of position 2, position 6, position 14, or any combination thereof, counting from position 1 of said first strand.

[0192] A nucleic acid wherein the second strand comprises a 2′-F modification at any of position 7, position 9, position 11, or any combination thereof, counting from position 1 of said second strand.

[0193] A nucleic acid wherein the first and second strand each comprise 2′-Me and 2′-F modifications.

[0194] A nucleic which comprises at least one thermally destabilizing modification, suitably at one or more of positions 1 to 9 of the first strand counting from position 1 of the first strand, and/or at one or more of positions on the second strand aligned with positions 1 to 9 of the first strand, wherein the destabilizing modification is selected from a modified unlocked nucleic acid (UNA) and a glycol nucleic acid (GNA), preferably a glycol nucleic acid, more preferably an (S)-glycol nucleic acid.

[0195] A nucleic acid which comprises at least one thermally destabilizing modification at position 7 of the first strand, counting from position 1 of the first strand.

[0196] A nucleic acid which is an siRNA oligonucleoside, wherein the siRNA oligonucleoside comprises 3 or more 2′-F modifications at positions 6 to 12 of the second strand, such as 4, 5, 6 or 7 2′-F modifications at positions 6 to 12 of the second strand, counting from position 1 of said second strand.

[0197] A nucleic acid which is an siRNA oligonucleoside, wherein said second strand comprises at least 3, such as 4, 5 or 6, 2′-Me modifications at positions 1 to 6 of the second strand, counting from position 1 of said second strand.

[0198] A nucleic acid which is an siRNA oligonucleoside, wherein said first strand comprises at least 5 2′-Me consecutive modifications at the 3′ terminal region, preferably including the terminal nucleoside at the 3′ terminal region, or at least within 1 or 2 nucleosides from the terminal nucleoside at the 3′ terminal region.

[0199] A nucleic acid which is an siRNA oligonucleoside, wherein said first strand comprises 72′-Me consecutive modifications at the 3′ terminal region, preferably including the terminal nucleoside at the 3′ terminal region.

[0200] A nucleic acid which is an siRNA oligonucleoside, wherein each of the first and second strands comprises an alternating modification pattern, preferably a fully alternating modification pattern along the entire length of each of the first and second strands, wherein the nucleosides of the first strand are modified by (i) 2′Me modifications on the odd numbered nucleosides counting from position 1 of the first strand, and (ii) 2′F modifications on the even numbered nucleosides counting from position 1 of the first strand, and nucleosides of the second strand are modified by (i) 2′F modifications on the odd numbered nucleosides counting from position 1 of the second strand, and (ii) 2′Me modifications on the even numbered nucleosides counting from position 1 of the second strand. Typically such fully alternating modification patterns are present in a blunt ended oligonucleoside, wherein each of the first and second strands are 19 nucleosides in length.

[0201] Position 1 of the first or the second strand is the nucleoside which is the closest to the end of the nucleic acid (ignoring any abasic nucleosides) and that is joined to an adjacent nucleoside (at Position 2) via a 3′ to 5′ internal bond, with reference to the bonds between the sugar moieties of the backbone, and reading in a direction away from that end of the molecule.

[0202] It can therefore be seen that “position 1 of the sense strand” is the 5′ most nucleoside (not including abasic nucleosides) at the conventional 5′ end of the sense strand. Typically, the nucleoside at this position 1 of the sense strand will be equivalent to the 5′ nucleoside of the selected target nucleic acid sequence, and more generally the sense strand will have equivalent nucleosides to those of the target nucleic acid sequence starting from this position 1 of the sense strand, whilst also allowing for acceptable mismatches between the sequences.

[0203] As used herein, “position 1 of the antisense strand” is the 5′ most nucleoside (not including abasic nucleosides) at the conventional 5′ end of the antisense strand. As hereinbefore described, there will be a region of complementarity between the sense and antisense strands, and in this way the antisense strand will also have a region of complementarity to the target nucleic acid sequence as referred to above.

[0204] In certain embodiments, the nucleic acid e.g. siRNA agent further comprises at least one phosphorothioate or methylphosphonate internucleoside linkage. For example the phosphorothioate or methylphosphonate internucleoside linkage can be at the 3′-terminus or in the terminal region of one strand, i.e., the sense strand or the antisense strand; or at the ends of both strands, the sense strand and the antisense strand.

[0205] In certain embodiments, the phosphorothioate or methylphosphonate internucleoside linkage is at the 5′ terminus or in the terminal region of one strand, i.e., the sense strand or the antisense strand; or at the ends of both strands, the sense strand and the antisense strand.

[0206] In certain embodiments, a phosphorothioate or a methylphosphonate internucleoside linkage is at both the 5′- and 3′-terminus or in the terminal region of one strand, i.e., the sense strand or the antisense strand; or at the ends of both strands, the sense strand and the antisense strand.

[0207] Any nucleic acid may comprise one or more phosphorothioate (PS) modifications within the nucleic acid, such as at least two PS internucleoside bonds at the ends of a strand.

[0208] At least one of the oligoribonucleoside strands preferably comprises at least two consecutive phosphorothioate modifications in the last 3 nucleosides of the oligonucleoside.

[0209] The invention therefore also relates to: A nucleic acid disclosed herein which comprises phosphorothioate internucleoside linkages respectively between at least two or three consecutive positions, such as in a 5′ and/or 3′ terminal region and/or near terminal region of the second strand, whereby said near terminal region is preferably adjacent said terminal region wherein said one or more abasic nucleosides of said second strand is/are located.

[0210] A nucleic acid disclosed herein which comprises phosphorothioate internucleoside linkages respectively between at least two or three consecutive positions in a 5′ and/or 3′ terminal region of the first strand, whereby preferably the terminal position at the 5′ and/or 3′ terminal region of said first strand is attached to its adjacent position by a phosphorothioate internucleoside linkage.

[0211] The nucleic acid strand may be an RNA comprising a phosphorothioate internucleoside linkage between the three nucleosides contiguous with 2 terminally located abasic nucleosides.

[0212] A preferred nucleic acid is a double stranded RNA comprising 2 adjacent abasic nucleosides at the 5′ terminus of the second strand and a ligand moiety comprising one or more GalNAc ligand moieties at the opposite 3′ end of the second strand. Further preferred, the same nucleic acid may also comprise a phosphorothioate bond between nucleotides at positions 3-4 and 4-5 of the second strand, reading from the position 1 of the second strand. Further preferred, the same nucleic acid may also comprise a 2′ F modification at positions 7, 9 and 11 of the second strand.

[0213] Preferred modifications are as follows.

[0214] A nucleic acid wherein modified nucleosides of said second strand comprise a modification pattern according to any one of the following (5′-3′):

Me-Me-Me-Me-Me-Me-F-F-F-F-F-Me-Me-Me-Me-Me-Me-Me-
F-Me-Me,
or
Me-Me-Me-Me-Me-F-F-Me-F-F-F-F-Me-Me-Me-Me-Me-Me-
Me-Me-Me,
or
Me-Me-Me-Me-Me-Me-F-Me-F-F-F-F-Me-Me-Me-Me-Me-Me-
Me-Me-Me,
or
Me-Me-Me-Me-Me-Me-Me-Me-F-F-F-Me-Me-Me-Me-Me-Me-
Me-Me-Me-Me,
or
Me-Me-Me-Me-Me-Me-F-Me-F-F-F-Me-Me-Me-Me-Me-Me-
Me-Me-Me-Me.

[0215] A nucleic acid wherein modified nucleosides of said second strand comprise a modification pattern according to any one of the following (5′-3′):

Me(s)Me(s)Me-Me-Me-Me-F-F-F-F-F-Me-Me-Me-Me-Me-
Me-Me-F-Me-Me,
or
Me(s)Me(s)Me-Me-Me-F-F-Me-F-F-F-F-Me-Me-Me-Me-
Me-Me-Me-Me-Me,
or
Me(s)Me(s)Me-Me-Me-Me-F-Me-F-F-F-F-Me-Me-Me-Me-
Me-Me-Me-Me-Me,
or
Me(s)Me(s)Me-Me-Me-Me-Me-Me-F-F-F-Me-Me-Me-Me-
Me-Me-Me-Me-Me-Me,
or
Me(s)Me(s)Me-Me-Me-Me-F-Me-F-F-F-Me-Me-Me-Me-Me-
Me-Me-Me-Me-Me,
or
Me-Me-Me-Me-Me-Me-F-F-F-F-F-Me-Me-Me-Me-Me-Me-Me-
F(s)Me(s)Me,
or
Me-Me-Me-Me-Me-F-F-Me-F-F-F-F-Me-Me-Me-Me-Me-Me-
Me(s)Me(s)Me,
or
Me-Me-Me-Me-Me-Me-F-Me-F-F-F-F-Me-Me-Me-Me-Me-
Me-Me(s)Me(s)Me,
or
Me-Me-Me-Me-Me-Me-Me-Me-F-F-F-Me-Me-Me-Me-Me-Me-
Me-Me(s)Me(s)Me,
or
Me-Me-Me-Me-Me-Me-F-Me-F-F-F-Me-Me-Me-Me-Me-Me-
Me-Me(s)Me(s)Me,

[0216] wherein(s) is a phosphorothioate internucleoside linkage.

[0217] A nucleic acid wherein modified nucleosides of said second strand comprise a modification pattern according to any one of the following (5′-3′):

ia - ia - Me - Me - Me - Me - Me - Me - F - F -
F - F - F - Me - Me - Me - Me - Me - Me - Me - F -
Me - Me,
or
ia - ia - Me - Me - Me - Me - Me - F - F - Me -
F - F - F - F - Me - Me - Me - Me - Me - Me - Me -
Me,
or
ia - ia - Me - Me - Me - Me - Me - Me - F - Me -
F - F - F - F - Me - Me - Me - Me - Me - Me - Me -
Me,
or
ia - ia - Me - Me - Me - Me - Me - Me - Me - Me -
F - F - F - Me - Me - Me - Me - Me - Me - Me -
Me - Me,
or
ia - ia - Me - Me - Me - Me - Me - Me - F - Me -
F - F - F - Me - Me - Me - Me - Me - Me- Me -
Me - Me - Me,
or
Me - Me - Me - Me - Me - Me - F - F - F - F - F -
Me - Me - Me - Me - Me - Me - Me - F - Me - Me -
ia - ia,
or
Me - Me - Me - Me - Me - F - F - Me - F - F - F -
F - Me - Me - Me - Me - Me - Me - Me - Me - Me -
ia - ia,
or
Me - Me - Me - Me - Me - Me -F- Me - F - F - F -
F - Me - Me - Me - Me - Me - Me - Me - Me - Me -
ia - ia,
or
Me - Me - Me - Me - Me - Me - Me - Me - F - F -
F - Me - Me - Me - Me - Me - Me - Me - Me - Me -
Me - ia - ia,
or
Me - Me - Me - Me - Me - Me - F - Me - F - F - F -
Me - Me - Me - Me - Me - Me - Me - Me - Me - Me -
ia - ia,

[0218] wherein ia represents an inverted abasic nucleoside, and when the inverted abasic nucleosides as represented by ia-ia are present at the 3′ terminus of the second strand, said inverted abasic nucleosides are present in a 2 nucleoside overhang.

[0219] A nucleic acid wherein modified nucleosides of said second strand comprise a modification pattern according to any one of the following (5′-3′):

ia - ia - Me(s)Me(s)Me - Me - Me - Me - F - F -
F - F - F - Me - Me - Me - Me - Me - Me - Me - F -
Me - Me,
or
ia - ia - Me(s)Me(s)Me - Me - Me - F - F - Me -
F - F - F - F - Me - Me - Me - Me - Me - Me - Me -
Me - Me,
or
ia - ia - Me(s)Me(s)Me - Me - Me - Me -F- Me - F -
F - F - F - Me - Me - Me - Me - Me - Me - Me -
Me - Me,
or
ia - ia - Me(s)Me(s)Me - Me - Me - Me - Me - Me -
F - F - F - Me - Me - Me - Me - Me - Me - Me -
Me - Me - Me,
or
ia - ia - Me(s)Me(s)Me - Me - Me - Me - F - Me -
F - F - F - Me - Me - Me - Me - Me - Me - Me -
Me - Me - Me,
or
Me - Me - Me - Me - Me - Me - F - F - F - F - F -
Me - Me - Me - Me - Me - Me - Me - F(s)Me(s)Me -
ia - ia,
or
Me - Me - Me - Me - Me - F - F - Me - F - F - F -
F - Me - Me - Me - Me - Me - Me - Me(s)Me(s)Me -
ia - ia,
or
Me - Me - Me - Me - Me - Me -F- Me - F - F - F -
F - Me - Me - Me - Me - Me - Me - Me(s)Me(s)Me -
ia - ia,
or
Me - Me - Me - Me - Me - Me - Me - Me - F - F -
F - Me - Me - Me - Me - Me - Me - Me(s)Me(s)Me -
ia - ia,
or
Me - Me - Me - Me - Me - Me - F - Me - F - F - F -
Me - Me - Me - Me - Me - Me - Me - Me(s)Me(s)Me -
ia - ia,

[0220] wherein:
[0221] (s) is a phosphorothioate internucleoside linkage, ia represents an inverted abasic nucleoside, and when the inverted abasic nucleosides as represented by ia-ia are present at the 3′ terminus of the second strand, said inverted abasic nucleosides are present in a 2 nucleoside overhang.

[0222] A nucleic acid wherein modified nucleosides comprise any one of the following

Modification pattern 1:
Second strand (5′-3′): Me - Me - Me - Me - Me -
Me - F - F - F - F - F - Me - Me - Me - Me - Me -
Me - Me - F - Me - Me,
First strand (5′-3′): Me - F - Me - F - Me - F -
Me - F - F - Me - Me - Me - Me - F - Me - F - Me -
Me - Me - Me - Me - Me - Me
Or
Modification pattern 2:
Second strand (5′-3′): Me - Me - Me - Me - Me -
F - F - Me - F - F - F - F - Me - Me - Me - Me -
Me - Me - Me - Me - Me,
First strand (5′-3′): Me - F - Me - F - Me - F -
Me - F - F - Me - Me - Me - Me - F - Me - F - Me -
Me - Me - Me - Me - Me - Me
Or
Modification pattern 3:
Second strand (5′-3′): Me - Me - Me - Me - Me -
Me - F - Me - F - F - F - F - Me - Me - Me - Me -
Me - Me - Me - Me - Me,
First strand (5′-3′): Me - F - Me - F - Me - F -
Me - F - F - Me - Me - Me - Me - F - Me - F - Me -
Me - Me - Me - Me - Me - Me
Or
Modification pattern 4:
Second strand (5′-3′): Me - Me - Me - Me - Me -
Me - F - Me - F - F - F - F - Me - Me - Me - Me -
Me - Me - Me - Me - Me,
First strand (5′-3′): Me - F - Me - F - Me - F -
Me - Me - Me - Me - Me - Me - Me - F - Me - F -
Me - Me - Me - Me - Me - Me - Me
Or
Modification pattern 5:
Second strand (5′33′3: Me - Me - Me - Me - Me -
Me - Me - Me - F - F - F - Me - Me - Me - Me -
Me - Me - Me - Me - Me - Me,
First strand (5′-3′): Me - F - Me - Me - Me - F -
Me - Me - F - Me - Me - Me - Me - F - Me - F -
Me - Me - Me - Me - Me - Me - Me
Or
Modification pattern 6:
Second strand (5′-3′): Me - Me - Me - Me - Me -
Me - F - Me - F - F - F - Me - Me - Me - Me - Me -
Me - Me - Me - Me - Me,
First strand (5′-3′): Me - F - Me - Me - Me - F -
Me - Me - F - Me - Me - Me - Me - F - Me - F -
Me - Me - Me - Me - Me - Me - Me.

[0223] A nucleic acid wherein modified nucleosides comprise any one of the following

Modification pattern 1:
Second strand (5′-3′): Me(s)Me(s)Me - Me - Me -
Me - F - F - F - F - F - Me - Me - Me - Me - Me -
Me - Me - F - Me - Me,
First strand (5′-3′): Me(s)F(s)Me - F - Me - F -
Me - F - F - Me - Me - Me - Me - F - Me - F - Me -
Me - Me - Me - Me(s)Me(s)Me
Or
Modification pattern 2:
Second strand (5′-3′): Me(s)Me(s)Me - Me - Me -
F - F - Me - F - F - F - F - Me - Me - Me - Me -
Me - Me - Me - Me - Me,
First strand (5′-3′):
Me(s)F(s)Me - F - Me - F - Me - F - F - Me - Me -
Me - Me - F - Me - F - Me - Me - Me - Me -
Me(s)Me(s)Me
Or
Modification pattern 3:
Second strand (5′-3′): Me(s)Me(s)Me - Me - Me -
Me -F- Me - F - F - F - F - Me - Me - Me - Me -
Me - Me - Me - Me - Me,
First strand (5′-3′): Me(s)F(s)Me - F - Me - F -
Me - F - F - Me - Me - Me - Me - F - Me - F - Me -
Me - Me - Me - Me(s)Me(s)Me
Or
Modification pattern 4:
Second strand (5′-3′): Me(s)Me(s)Me - Me - Me -
Me - F - Me - F - F - F - F - Me - Me - Me - Me -
Me - Me - Me - Me - Me,
First strand (5′-3′): Me(s)F(s)Me - F - Me - F -
Me - Me - Me - Me - Me - Me - Me - F - Me - F -
Me - Me - Me - Me - Me(s)Me(s)Me
Or
Modification pattern 5:
Second strand (5′-3′): Me(s)Me(s)Me - Me - Me -
Me - Me - Me - F - F - F - Me - Me - Me - Me -
Me - Me - Me - Me - Me - Me,
First strand (5′-3′): Me(s)F(s)Me - Me - Me - F -
Me - Me - F - Me - Me - Me - Me - F - Me - F -
Me - Me - Me - Me - Me(s)Me(s)Me
Or
Modification pattern 6:
Second strand (5′-3′): Me(s)Me(s)Me - Me - Me -
Me - F - Me - F - F - F - Me - Me - Me - Me - Me -
Me - Me - Me - Me - Me,
First strand (5′-3′): Me(s)F(s)Me - Me - Me - F -
Me - Me - F - Me - Me - Me - Me - F - Me - F -
Me - Me - Me - Me - Me(s)Me(s)Me

[0224] wherein(s) is a phosphorothioate internucleoside linkage.

[0225] A nucleic acid wherein modified nucleosides comprise any one of the following

Modification pattern 1:
Second strand (5′-3′): Me - Me - Me - Me - Me -
Me - F - F - F - F - F - Me - Me - Me - Me - Me -
Me - Me - F(s)Me(s)Me,
First strand (5′-3′): Me(s)F(s)Me - F - Me - F -
Me - F - F - Me - Me - Me - Me - F - Me - F - Me -
Me - Me - Me - Me(s)Me(s)Me
Or
Modification pattern 2:
Second strand (5′-3′): Me - Me - Me - Me - Me -
F - F - Me - F - F - F - F - Me - Me - Me - Me -
Me - Me - Mc(s)Me(s)Me,
First strand (5′-3′): Me(s)F(s)Me - F - Me - F -
Me - F - F - Me - Me - Me - Me - F - Me - F - Me -
Me - Me - Me - Me(s)Me(s)Me
Or
Modification pattern 3:
Second strand (5′-3′): Me - Me - Me - Me - Me -
Me -F- Me - F - F - F - F - Me - Me - Me - Me -
Me - Me - Me(s)Me(s)Me,
First strand (5′-3′): Me(s)F(s)Me - F - Me - F -
Me - F - F - Me - Me - Me - Me - F - Me - F - Me -
Me - Me - Me - Me(s)Me(s)Me
Or
Modification pattern 4:
Second strand (5′-3′): Me - Me - Me - Me - Me -
Me - F - Me - F - F - F - F - Me - Me - Me - Me -
Me - Me - Me(s)Me(s)Me,
First strand (5′-3′): Me(s)F(s)Me - F - Me - F -
Me - Me - Me - Me - Me - Me - Me - F - Me - F -
Me - Me - Me - Me - Me(s)Me(s)Me
Or
Modification pattern 5:
Second strand (5′-3′): Me - Me - Me - Me - Me -
Me - Me - Me - F - F - F - Me - Me - Me - Me -
Me - Me - Me - Me(s)Me(s)Me,
First strand (5′-3′): Me(s)F(s)Me - Me - Me - F -
Me - Me - F - Me - Me - Me - Me - F - Me - F -
Me - Me - Me - Me - Me(s)Me(s)Me
Or
Modification pattern 6:
Second strand (5′-3′): Me - Me - Me - Me - Me -
Me - F - Me - F - F - F - Me - Me - Me - Me - Me -
Me - Me - Me(s)Me(s)Me,
First strand (5′-3′): Me(s)F(s)Me - Me - Me - F -
Me - Me - F - Me - Me - Me - Me - F - Me - F -
Me - Me - Me - Me - Me(s)Me(s)Me

[0226] wherein(s) is a phosphorothioate internucleoside linkage.

[0227] A nucleic acid wherein modified nucleosides comprise any one of the following

Modification pattern 1:
Second strand (5′-3′): ia - ia - Me - Me - Me -
Me - Me - Me - F - F - F - F - F - Me - Me - Me -
Me - Me - Me - Me - F - Me - Me,
First strand (5′-3′): Me - F - Me - F - Me - F -
Me - F - F - Me - Me - Me - Me - F - Me - F - Me -
Me - Me - Me - Me - Me - Me
Or
Modification pattern 2:
Second strand (5′-3′): ia - ia - Me - Me - Me -
Me - Me - F - F - Me - F - F - F - F - Me - Me -
Me - Me - Me - Me - Me - Me - Me,
First strand (5′-3′): Me - F - Me - F - Me - F -
Me - F - F - Me - Me - Me - Me - F - Me - F - Me -
Me - Me - Me - Me - Me - Me
Or
Modification pattern 3:
Second strand (5′-3′): ia - ia - Me - Me - Me -
Me - Me - Me -F- Me - F - F - F - F - Me - Me -
Me - Me - Me - Me - Me - Me - Me,
First strand (5′-3′): Me - F - Me - F - Me - F -
Me - F - F - Me - Me - Me - Me - F - Me - F - Me -
Me - Me - Me - Me - Me - Me
Or
Modification pattern 4:
Second strand (5′-3′): ia - ia - Me - Me - Me -
Me - Me - Me - F - Me - F - F - F - F - Me - Me -
Me - Me - Me - Me - Me - Me - Me,
First strand (5′-3′): Me - F - Me - F - Me - F -
Me - Me - Me - Me - Me - Me - Me - F - Me - F -
Me - Me - Me - Me - Me - Me - Me
Or
Modification pattern 5:
Second strand (5′-3′): ia - ia - Me - Me - Me -
Me - Me - Me - Me - Me - F - F - F - Me - Me -
Me - Me - Me - Me - Me - Me - Me - Me,
First strand (5′-3′): Me - F - Me - Me - Me - F -
Me - Me - F - Me - Me - Me - Me - F - Me - F -
Me - Me - Me - Me - Me - Me - Me
Or
Modification pattern 6:
Second strand (5′-3′): ia - ia - Me - Me - Me -
Me - Me - Me - F - Me - F - F - F - Me - Me - Me -
Me - Me - Me - Me - Me - Me - Me,
First strand (5′-3′): Me - F - Me - Me - Me - F -
Me - Me - F - Me - Me - Me - Me - F - Me - F -
Me - Me - Me - Me - Me - Me - Me,

[0228] wherein ia represents an inverted abasic nucleoside.

[0229] A nucleic acid wherein modified nucleosides comprise any one of the following

Modification pattern 1:
Second strand (5′-3′): Me - Me - Me - Me - Me -
Me - F - F - F - F - F - Me - Me - Me - Me - Me -
Me - Me - F - Me - Me - ia - ia,
First strand (5′-3′): Me - F - Me - F - Me - F -
Me - F - F - Me - Me - Me - Me - F - Me - F - Me -
Me - Me - Me - Me - Me - Me
Or
Modification pattern 2:
Second strand (5′-3′): Me - Me - Me - Me - Me -
F - F - Me - F - F - F - F - Me - Me - Me - Me -
Me - Me - Me - Me - Me - ia - ia,
First strand (5′-3′): Me - F - Me - F - Me - F -
Me - F - F - Me - Me - Me - Me - F - Me - F - Me -
Me - Me - Me - Me - Me - Me
Or
Modification pattern 3:
Second strand (5′-3′): Me - Me - Me - Me - Me -
Me -F- Me - F - F - F - F - Me - Me - Me - Me -
Me - Me - Me - Me - Me - ia - ia,
First strand (5′-3′): Me - F - Me - F - Me - F -
Me - F - F - Me - Me - Me - Me - F - Me - F - Me -
Me - Me - Me - Me - Me - Me
Or
Modification pattern 4:
Second strand (5′-3′): Me - Me - Me - Me - Me -
Me - F - Me - F - F - F - F - Me - Me - Me - Me -
Me - Me - Me - Me - Me - ia - ia,
First strand (5′-3′): Me - F - Me - F - Me - F -
Me - Me - Me - Me - Me - Me - Me - F - Me - F -
Me - Me - Me - Me - Me - Me - Me
Or
Modification pattern 5:
Second strand (5′-3′): Me - Me - Me - Me - Me -
Me - Me - Me - F - F - F - Me - Me - Me - Me -
Me - Me - Me - Me - Me - Me - ia - ia,
First strand (5′-3′): Me - F - Me - Me - Me - F -
Me - Me - F - Me - Me - Me - Me - F - Me - F -
Me - Me - Me - Me - Me - Me - Me
Or
Modification pattern 6:
Second strand (5′-3′): Me - Me - Me - Me - Me -
Me - F - Me - F - F - F - Me - Me - Me - Me - Me -
Me - Me - Me - Me - Me - ia - ia,
First strand (5′-3′): Me - F - Me - Me - Me - F -
Me - Me - F - Me - Me - Me - Me - F - Me - F -
Me - Me - Me - Me - Me - Me - Me,

[0230] wherein ia represents an inverted abasic nucleoside, and when the inverted abasic nucleosides as represented by ia-ia are present at the 3′ terminus of the second strand, said inverted abasic nucleosides are present in a 2 nucleoside overhang.

[0231] A nucleic acid wherein modified nucleosides comprise any one of the following

Modification pattern 1:
Second strand (5′-3′): ia - ia - Me(s)Me(s)Me -
Me - Me - Me - F - F - F - F - F - Me - Me - Me -
Me - Me - Me - Me - F - Me - Me,
First strand (5′-3′): Me(s)F(s)Me - F - Me - F -
Me - F - F - Me - Me - Me - Me - F - Me - F - Me -
Me - Me - Me - Me(s)Me(s)Me
Or
Modification pattern 2:
Second strand (5′-3′): ia - ia - Me(s)Me(s)Me -
Me - Me - F - F - Me - F - F - F - F - Me - Me -
Me - Me - Me - Me - Me - Me - Me,
First strand (5′-3′): Me(s)F(s)Me - F - Me - F -
Me - F - F - Me - Me - Me - Me - F - Me - F - Me -
Me - Me - Me - Me(s)Me(s)Me
Or
Modification pattern 3:
Second strand (5′-3′): ia - ia - Me(s)Me(s)Me -
Me - Me - Me - F- Me - F - F - F - F - Me - Me -
Me - Me - Me - Me - Me - Me - Me,
First strand (5′-3′): Me(s)F(s)Me - F - Me - F -
Me - F - F - Me - Me - Me - Me - F - Me - F - Me -
Me - Me - Me - Me(s)Me(s)Me
Or
Modification pattern 4:
Second strand (5′-3′): ia - ia - Me(s)Me(s)Me -
Me - Me - Me - F - Me - F - F - F - F - Me - Me -
Me - Me - Me - Me - Me - Me - Me,
First strand (5′-3′): Me(s)F(s)Me - F - Me - F -
Me - Me - Me - Me - Me - Me - Me - F - Me - F -
Me - Me - Me - Me - Me(s)Me(s)Me
Or
Modification pattern 5:
Second strand (5′-3′): ia - ia - Me(s)Me(s)Me -
Me - Me - Me - Me - Me - F - F - F - Me - Me -
Me - Me - Me - Me - Me - Me - Me - Me,
First strand (5′-3′): Me(s)F(s)Me - Me - Me - F -
Me - Me - F - Me - Me - Me - Me - F - Me - F -
Me - Me - Me - Me - Me(s)Me(s)Me
Or
Modification pattern 6:
Second strand (5′-3′): ia - ia - Me(s)Me(s)Me -
Me - Me - Me - F - Me - F - F - F - Me - Me - Me -
Me - Me - Me - Me - Me - Me - Me,
First strand (5′-3′): Me(s)F(s)Me - Me - Me - F -
Me - Me - F - Me - Me - Me - Me - F - Me - F -
Me - Me - Me - Me - Me(s)Me(s)Me

[0232] wherein:
[0233] (s) is a phosphorothioate internucleoside linkage, ia represents an inverted abasic nucleoside.

[0234] A nucleic acid wherein modified nucleosides comprise any one of the following

Modification pattern 1:
Second strand (5′-3′): Me - Me - Me - Me - Me -
Me - F - F - F - F - F - Me - Me - Me - Me - Me -
Me - Me - F(s)Me(s)Me - ia - ia,
First strand (5′-3′): Me(s)F(s)Me - F - Me - F -
Me - F - F - Me - Me - Me - Me - F - Me - F - Me -
Me - Me - Me - Me(s)Me(s)Me
Or
Modification pattern 2:
Second strand (5′-3′): Me - Me - Me - Me - Me -
F - F - Me - F - F - F - F - Me - Me - Me - Me -
Me - Me - Me(s)Me(s)Me - ia - ia,
First strand (5′-3′): Me(s)F(s)Me - F - Me - F -
Me - F - F - Me - Me - Me - Me - F - Me - F - Me -
Me - Me - Me - Me(s)Me(s)Me
Or
Modification pattern 3:
Second strand (5′-3′): Me - Me - Me - Me - Me -
Me -F- Me - F - F - F - F - Me - Me - Me - Me -
Me - Me - Me(s)Me(s)Me - ia - ia,
First strand (5′-3′): Me(s)F(s)Me - F - Me - F -
Me - F - F - Me - Me - Me - Me - F - Me - F - Me -
Me - Me - Me - Me(s)Me(s)Me
Or
Modification pattern 4:
Second strand (5′-3′): Me - Me - Me - Me - Me -
Me - F - Me - F - F - F - F - Me - Me - Me - Me -
Me - Me - Me(s)Me(s)Me - ia - ia,
First strand (5′-3′): Me(s)F(s)Me - F - Me - F -
Me - Me - Me - Me - Me - Me - Me - F - Me - F -
Me - Me - Me - Me - Me(s)Me(s)Me
Or
Modification pattern 5:
Second strand (5′-3′): Me - Me - Me - Me - Me -
Me - Me - Me - F - F - F - Me - Me - Me - Me -
Me - Me - Me - Me(s)Me(s)Me - ia - ia,
First strand (5′-3′): Me(s)F(s)Me - Me - Me - F -
Me - Me - F - Me - Me - Me - Me - F - Me - F -
Me - Me - Me - Me - Me(s)Me(s)Me
Or
Modification pattern 6:
Second strand (5′-3′): Me - Me - Me - Me - Me -
Me - F - Me - F - F - F - Me - Me - Me - Me - Me -
Me - Me - Me(s)Me(s)Me - ia - ia,
First strand (5′-3′): Me(s)F(s)Me - Me - Me - F -
Me - Me - F - Me - Me - Me - Me - F - Me - F -
Me - Me - Me - Me - Me(s)Me(s)Me

[0235] wherein: (s) is a phosphorothioate internucleoside linkage, ia represents an inverted abasic nucleoside, and when the inverted abasic nucleosides as represented by ia-ia are present at the 3′ terminus of the second strand, said inverted abasic nucleosides are present in a 2 nucleoside overhang.

[0236] Particularly preferred is a nucleic acid wherein the modified nucleosides comprise the following modification pattern:

Modification pattern 4:
Second strand (5′-3′): ia - ia - Me(s)Me(s)Me -
Me - Me - Me - F - Me - F - F - F - F - Me - Me -
Me - Me - Me - Me - Me - Me - Me,
First strand (5′-3′): Me(s)F(s)Me - F - Me - F -
Me - Me - Me - Me - Me - Me - Me - F - Me - F -
Me - Me - Me - Me - Me(s)Me(s)Me

[0237] wherein: (s) is a phosphorothioate internucleoside linkage, ia represents an inverted abasic nucleoside.

[0238] A nucleic acid wherein the first strand comprises a 2′ sugar modification pattern wherein said modifications are selected at least from 2′Me and 2′F sugar modifications, provided that the overall number of 2′F sugar modifications in the first strand does not consist of four, or six, 2′F modifications,

[0239] A nucleic acid wherein the first strand comprises a 2′ sugar modification pattern wherein said modifications are selected at least from 2′Me and 2′F sugar modifications, wherein the overall number of 2′F sugar modifications in the first strand consists of three, five or seven 2′F modifications.

[0240] A nucleic acid wherein the first strand comprises a 2′ sugar modification pattern wherein said modifications are selected at least from 2′Me and 2′F sugar modifications, wherein the overall number of 2′F sugar modifications in the first strand consists of three 2′F modifications.

[0241] A nucleic acid wherein the first strand comprises a 2′ sugar modification pattern wherein said modifications are selected at least from 2′Me and 2′F sugar modifications, wherein the overall number of 2′F sugar modifications in the first strand consists of five 2′F modifications.

[0242] A nucleic acid wherein the first strand comprises a 2′ sugar modification pattern as follows (5′-3′):

Me - F - Me - X₂ - Me - F - (Me)₇ - (F - Me)₂ -
X₃ - Me - X₄ - (Me)₃

[0243] wherein X₂, X₃ and X₄ are selected from 2′Me and 2′F sugar modifications, provided that for X₂, X₃ and X₄ at least one is a 2′F sugar modification, and the other two sugar modifications are 2′Me sugar modifications.

[0244] A nucleic acid wherein the first strand comprises a 2′ sugar modification pattern as follows (5′-3′):

Me - F - Me - X₂ - Me - F - (Me)₇ - (F - Me)₂ -
X₃ - Me - X₄ - (Me)₃

[0245] wherein X₂ is a 2′F sugar modification, and X₃ and X₄ are 2′Me sugar modifications.

[0246] A nucleic acid wherein the first strand comprises a 2′ sugar modification pattern as follows (5′-3′):

Me - F - Me - X₂ - Me - F - (Me)₇ - (F - Me)₂ -
X₃ - Me - X₄ - (Me)₃

[0247] wherein X₃ is a 2′F sugar modification, and X₂ and X₄ are 2′Me sugar modifications.

[0248] A nucleic acid wherein the first strand comprises a 2′ sugar modification pattern as follows (5′-3′):

Me - F - Me - X₂ - Me - F - (Me)₇ - (F - Me)₂ -
X₃ - Me - X₄ - (Me)₃

[0249] wherein X₄ is a 2′F sugar modification, and X₂ and X₃ are 2′Me sugar modifications.

[0250] A nucleic acid wherein the first strand comprises a 2′ sugar modification pattern wherein said modifications are selected at least from 2′Me and 2′F sugar modifications, wherein the overall number of 2′F sugar modifications in the first strand consists of seven 2′F modifications.

[0251] A nucleic acid wherein the first strand comprises a 2′ sugar modification pattern as follows (5′-3′):

Me - F - Me - X₂ - Me - F - Me - (F)₂ - (Me)₄ -
(F - Me)₂ - X₃ - Me - X₄ - (Me)₃

[0252] wherein X₂, X₃ and X₄ are selected from 2′Me and 2′F sugar modifications, provided that for X₂, X₃ and X₄ at least one is a 2′F sugar modification, and the other two sugar modifications are 2′Me sugar modifications.

[0253] A nucleic acid wherein the first strand comprises a 2′ sugar modification pattern as follows (5′-3′):

Me-F-Me-X₂-Me-F-Me-(F)₂-(Me)₄-(F-Me)₂-X₃-Me-X₄-(Me)₃

[0254] wherein X₂ is a 2′F sugar modification, and X₃ and X₄ are 2′Me sugar modifications.

[0255] A nucleic acid wherein the first strand comprises a 2′ sugar modification pattern as follows (5′-3′):

Me-F-Me-X₂-Me-F-Me-(F)₂-(Me)₄-(F-Me)₂-X₃-Me-X₄-(Me)₃

[0256] wherein X₃ is a 2′F sugar modification, and X₂ and X₄ are 2′Me sugar modifications.

[0257] A nucleic acid wherein the first strand comprises a 2′ sugar modification pattern as follows (5′-3′):

Me-F-Me-X₂-Me-F-Me-(F)₂-(Me)₄-(F-Me)₂-X₃-Me-X₄-(Me)₃

[0258] wherein X₄ is a 2′F sugar modification, and X₂ and X₃ are 2′Me sugar modifications.

[0259] A nucleic acid wherein the first strand comprises a 2′ sugar modification pattern as follows (5′-33):

Me-F-(Me)₃-X₁-(Me)₇-F-Me-F-(Me)₇

[0260] wherein X₁ is a thermally destabilising modification.

[0261] A nucleic acid wherein the first strand comprises a 2′ sugar modification pattern as follows (5′-3′):

Me-F-(Me)₃-X₁-Me-(F)₂-(Me)₄-F-Me-F-(Me)₇

[0262] wherein X₁ is a thermally destabilising modification.

[0263] A nucleic acid wherein the second strand comprises a 2′ sugar modification pattern as follows (5′-3′):

(Me)₈-(F)₃-(Me)₁₀.

[0264] A nucleic acid wherein the second strand comprises a 2′ sugar modification pattern as follows (5′-3′):
[0265] (Me)₈-(F)₃-(Me)₁₀, and
[0266] wherein the first strand comprises a 2′ sugar modification pattern wherein said modifications are selected at least from 2′Me and 2′F sugar modifications, provided that the overall number of 2′F sugar modifications in the first strand does not consist of four, or six, 2′F modifications.

[0267] A nucleic acid wherein the second strand comprises a 2′ sugar modification pattern as follows (5′-3′):
[0268] (Me)₈-(F)₃-(Me)₁₀, and
[0269] wherein the first strand comprises a 2′ sugar modification pattern wherein said modifications are selected at least from 2′Me and 2′F sugar modifications, wherein the overall number of 2′F sugar modifications in the first strand consists of three, five or seven 2′F modifications.

[0270] A nucleic acid comprising a first strand that is at least partially complementary to a portion of RNA transcribed from the target gene, and a second strand that is at least partially complementary to the first strand, wherein said first and second strands form a duplex region of at least 17 nucleosides in length, and wherein nucleosides of said second strand comprise a 2′ sugar modification pattern as follows (5′-3′):
[0271] (Me)₈-(F)₃-(Me)₁₀, and
[0272] wherein nucleosides of said first strand comprise a 2′ sugar modification pattern as follows (5′-3′):
[0273] Me-F-(Me)₃-X₁-(Me)₇-F-Me-F-(Me)₇, wherein X₁ is a thermally destabilising modification.

[0274] A nucleic acid comprising a first strand that is at least partially complementary to a portion of RNA transcribed from the target gene, and a second strand that is at least partially complementary to the first strand, wherein said first and second strands form a duplex region of at least 17 nucleosides in length, and wherein nucleosides of said second strand comprise a 2′ sugar modification pattern as follows (5′-3′):
[0275] (Me)₈-(F)₃-(Me)₁₀, and
[0276] wherein nucleosides of said first strand comprise a 2′ sugar modification pattern as follows (5′-3′):

(Me-F)₃-(Me)₇-F-Me-F-(Me)₇.

[0277] A nucleic acid comprising a first strand that is at least partially complementary to a portion of RNA transcribed from the target gene, and a second strand that is at least partially complementary to the first strand, wherein said first and second strands form a duplex region of at least 17 nucleosides in length, and wherein nucleosides of said second strand comprise a 2′ sugar modification pattern as follows (5′-3′):
[0278] (Me)₈-(F)₃-(Me)₁₀, and
[0279] wherein nucleosides of said first strand comprise a 2′ sugar modification pattern as follows (5′-3′):

Me-F-(Me)₃-F-(Me)₇-(F-Me)₂-F-(Me)₅.

[0280] A nucleic acid comprising a first strand that is at least partially complementary to a portion of RNA transcribed from the target gene, and a second strand that is at least partially complementary to the first strand, wherein said first and second strands form a duplex region of at least 17 nucleosides in length, and wherein nucleosides of said second strand comprise a 2′ sugar modification pattern as follows (5′-3′):
[0281] (Me)₈-(F)₃-(Me)₁₀, and
[0282] wherein nucleosides of said first strand comprise a 2′ sugar modification pattern as follows (5′-3′):

Me-F-(Me)₃-F-(Me)₇-F-Me-F-(Me)₃-F-(Me)₃.

[0283] A nucleic acid comprising a first strand that is at least partially complementary to a portion of RNA transcribed from the target gene, and a second strand that is at least partially complementary to the first strand, wherein said first and second strands form a duplex region of at least 17 nucleosides in length, and wherein nucleosides of said second strand comprise a 2′ sugar modification pattern as follows (5′-3′):
[0284] (Me)₈-(F)₃-(Me)₁₀, and
[0285] wherein nucleosides of said first strand comprise a 2′ sugar modification pattern as follows (5′-3′):
[0286] Me-F-(Me)₃-X₁-Me-(F)₂-(Me)₄-F-Me-F-(Me) 7, wherein X₁ is a thermally destabilising modification.

[0287] A nucleic acid comprising a first strand that is at least partially complementary to a portion of RNA transcribed from the target gene, and a second strand that is at least partially complementary to the first strand, wherein said first and second strands form a duplex region of at least 17 nucleosides in length, and wherein nucleosides of said second strand comprise a 2′ sugar modification pattern as follows (5′-3′):
[0288] (Me)₈-(F)₃-(Me)₁₀, and
[0289] wherein nucleosides of said first strand comprise a 2′ sugar modification pattern as follows (5′-3′):

(Me-F)₃-Me-(F)₂-(Me)₄-(F-Me)₂-(Me)₆.

[0290] A nucleic acid comprising a first strand that is at least partially complementary to a portion of RNA transcribed from the target gene, and a second strand that is at least partially complementary to the first strand, wherein said first and second strands form a duplex region of at least 17 nucleosides in length, and wherein nucleosides of said second strand comprise a 2′ sugar modification pattern as follows (5′-3′):
[0291] (Me)₈-(F)₃-(Me)₁₀, and
[0292] wherein nucleosides of said first strand comprise a 2′ sugar modification pattern as follows (5′-3′):

Me-F-(Me)₃-F-Me-(F)₂-(Me)₄-(F-Me)₂-F-(Me)₅.

[0293] A nucleic acid comprising a first strand that is at least partially complementary to a portion of RNA transcribed from the target gene, and a second strand that is at least partially complementary to the first strand, wherein said first and second strands form a duplex region of at least 17 nucleosides in length, and wherein nucleosides of said second strand comprise a 2′ sugar modification pattern as follows (5′-3′):
[0294] (Me)₈-(F)₃-(Me)₁₀, and
[0295] wherein nucleosides of said first strand comprise a 2′ sugar modification pattern as follows (5′-3′):

Me-F-(Me)₃-F-Me-(F)₂-(Me)₄-(F-Me)₂-(Me)₂-F-(Me)₃.

[0296] A nucleic acid wherein the second strand comprises a 2′ sugar, and abasic modification pattern as follows (5′-3′):

ia-ia-(Me)₈-(F)₃-(Me)₁₀

[0297] wherein ia represents an inverted abasic nucleoside.

[0298] A nucleic acid wherein the second strand comprises a 2′ sugar, and abasic modification pattern as follows (5′-3′):
[0299] ia-ia-(Me)₈-(F)₃-(Me)₁₀, wherein ia represents an inverted abasic nucleoside; and
[0300] wherein the first strand comprises a 2′ sugar modification pattern wherein said modifications are selected at least from 2′Me and 2′F sugar modifications, provided that the overall number of 2′F sugar modifications in the first strand does not consist of four, or six, 2′F modifications.

[0301] A nucleic acid wherein the second strand comprises a 2′ sugar, and abasic modification pattern as follows (5′-3′):
[0302] ia-ia-(Me)₈-(F)₃-(Me)₁₀, wherein ia represents an inverted abasic nucleoside; and
[0303] wherein the first strand comprises a 2′ sugar modification pattern wherein said modifications are selected at least from 2′Me and 2′F sugar modifications, wherein the overall number of 2′F sugar modifications in the first strand consists of three, five or seven 2′F modifications.

[0304] A nucleic acid comprising a first strand that is at least partially complementary to a portion of RNA transcribed from the target gene, and a second strand that is at least partially complementary to the first strand, wherein said first and second strands form a duplex region of at least 17 nucleosides in length, and wherein nucleosides of said second strand comprise a 2′ sugar, and abasic modification pattern as follows (5′-3′):
[0305] ia-ia-(Me)₈-(F)₃-(Me)₁₀, wherein ia represents an inverted abasic nucleoside; and
[0306] wherein nucleosides of said first strand comprise a 2′ sugar modification pattern as follows (5′-3′):
[0307] Me-F-(Me)₃-X₁-(Me)₇-F-Me-F-(Me)₇, wherein X₁ is a thermally destabilising modification.

[0308] A nucleic acid comprising a first strand that is at least partially complementary to a portion of RNA transcribed from the target gene, and a second strand that is at least partially complementary to the first strand, wherein said first and second strands form a duplex region of at least 17 nucleosides in length, and wherein nucleosides of said second strand comprise a 2′ sugar, and abasic modification pattern as follows (5′-3′):
[0309] ia-ia-(Mc)-(F)₃-(Me)₁₀, wherein ia represents an inverted abasic nucleoside; and
[0310] wherein nucleosides of said first strand comprise a 2′ sugar modification pattern as follows (5′-3′):

(Me-F)₃-(Me)₇-F-Me-F-(Me)₇.

[0311] A nucleic acid comprising a first strand that is at least partially complementary to a portion of RNA transcribed from the target gene, and a second strand that is at least partially complementary to the first strand, wherein said first and second strands form a duplex region of at least 17 nucleosides in length, and wherein nucleosides of said second strand comprise a 2′ sugar, and abasic modification pattern as follows (5′-3′):
[0312] ia-ia-(Me)₈-(F)₃-(Me)₁₀, wherein ia represents an inverted abasic nucleoside; and
[0313] wherein nucleosides of said first strand comprise a 2′ sugar modification pattern as follows (5′-3′):

Me-F-(Me)₃-F-(Me)₇-(F-Me)₂-F-(Me)₅.

[0314] A nucleic acid comprising a first strand that is at least partially complementary to a portion of RNA transcribed from the target gene, and a second strand that is at least partially complementary to the first strand, wherein said first and second strands form a duplex region of at least 17 nucleosides in length, and wherein nucleosides of said second strand comprise a 2′ sugar, and abasic modification pattern as follows (5′-3′):
[0315] ia-ia-(Me)₂-(F)₃-(Me)₁₀, wherein ia represents an inverted abasic nucleoside; and
[0316] wherein nucleosides of said first strand comprise a 2′ sugar modification pattern as follows (5′-3′):

Me-F-(Me)₃-F-(Me)₇-F-Me-F-(Me)₃-F-(Me)₃.

[0317] A nucleic acid comprising a first strand that is at least partially complementary to a portion of RNA transcribed from the target gene, and a second strand that is at least partially complementary to the first strand, wherein said first and second strands form a duplex region of at least 17 nucleosides in length, and wherein nucleosides of said second strand comprise a 2′ sugar, and abasic modification pattern as follows (5′-3′):
[0318] ia-ia-(Me)₈-(F)₃-(Me)₁₀, wherein ia represents an inverted abasic nucleoside; and
[0319] wherein nucleosides of said first strand comprise a 2′ sugar modification pattern as follows (5′-3′):

Me-F-(Me)₃-X₁-Me-(F)₂-(Me)₄-F-Me-F-(Me)₇,

[0320] wherein X₁ is a thermally destabilising modification.

[0321] A nucleic acid comprising a first strand that is at least partially complementary to a portion of RNA transcribed from the target gene, and a second strand that is at least partially complementary to the first strand, wherein said first and second strands form a duplex region of at least 17 nucleosides in length, and wherein nucleosides of said second strand comprise a 2′ sugar, and abasic modification pattern as follows (5′-3′):
[0322] ia-ia-(Me)₈-(F)₃-(Me)₁₀, wherein ia represents an inverted abasic nucleoside; and
[0323] wherein nucleosides of said first strand comprise a 2′ sugar modification pattern as follows (5′-3′):

(Me-F)₃-Me-(F)₂-(Me)₄-(F-Me)₂-(Me)₆.

[0324] A nucleic acid comprising a first strand that is at least partially complementary to a portion of RNA transcribed from the target gene, and a second strand that is at least partially complementary to the first strand, wherein said first and second strands form a duplex region of at least 17 nucleosides in length, and wherein nucleosides of said second strand comprise a 2′ sugar, and abasic modification pattern as follows (5′-3′):
[0325] ia-ia-(Me)₈-(F)₃-(Me)₁₀, wherein ia represents an inverted abasic nucleoside; and
[0326] wherein nucleosides of said first strand comprise a 2′ sugar modification pattern as follows (5′-3′):

Me-F-(Me)₃-F-Me-(F)₂-(Me)₄-(F-Me)₂-F-(Me)₅.

[0327] A nucleic acid comprising a first strand that is at least partially complementary to a portion of RNA transcribed from the target gene, and a second strand that is at least partially complementary to the first strand, wherein said first and second strands form a duplex region of at least 17 nucleosides in length, and wherein nucleosides of said second strand comprise a 2′ sugar, and abasic modification pattern as follows (5′-3′):
[0328] ia-ia-(Me)₈-(F)₃-(Me)₁₀, wherein ia represents an inverted abasic nucleoside; and
[0329] wherein nucleosides of said first strand comprise a 2′ sugar modification pattern as follows (5′-3′):

Me-F-(Me)₃-F-Me-(F)₂-(Me)₄-(F-Me)₂-(Me)₂-F-(Me)₃.

[0330] A nucleic acid wherein the second strand comprises a 2′ sugar modification pattern as follows (5′-3′):

ia-ia-Me(s)Me(s)(Me)₆₋(F)₃-(Me)₁₀,

[0331] wherein ia represents an inverted abasic nucleoside, and(s) represents a phosphorothioate linkage.

[0332] A nucleic acid wherein the second strand comprises a 2′ sugar modification pattern as follows (5′-3′):
[0333] ia-ia-Me(s)Me(s)(Me)₆-(F)₃-(Me)₁₀, wherein ia represents an inverted abasic nucleoside, and(s) represents a phosphorothioate linkage; and
[0334] wherein the first strand comprises a 2′ sugar modification pattern wherein said modifications are selected at least from 2′Me and 2′F sugar modifications, provided that the overall number of 2′F sugar modifications in the first strand does not consist of four, or six, 2′F modifications.

[0335] A nucleic acid wherein the second strand comprises a 2′ sugar modification pattern as follows (5′-3′):
[0336] ia-ia-Me(s)Me(s)(Me)₆-(F)₃-(Me)₁₀, wherein ia represents an inverted abasic nucleoside, and(s) represents a phosphorothioate linkage; and
[0337] wherein the first strand comprises a 2′ sugar modification pattern wherein said modifications are selected at least from 2′Me and 2′F sugar modifications, wherein the overall number of 2′F sugar modifications in the first strand consists of three, five or seven 2′F modifications.

[0338] A nucleic acid comprising a first strand that is at least partially complementary to a portion of RNA transcribed from the target gene, and a second strand that is at least partially complementary to the first strand, wherein said first and second strands form a duplex region of at least 17 nucleosides in length, and wherein nucleosides of said second strand comprise a 2′ sugar, and abasic modification pattern as follows (5′-3′):
[0339] ia-ia-Me(s)Me(s)(Me)₆-(F)₃-(Me)₁₀, wherein ia represents an inverted abasic nucleoside, and(s) represents a phosphorothioate linkage, and
[0340] wherein nucleosides of said first strand comprise a 2′ sugar modification pattern as follows (5′-3′):
[0341] Me(s)F(s)(Me)₃-X₁-(Me)₇-F-Me-F-(Me)₅(s)Me(s)Me, wherein X₁ is a thermally destabilising modification.

[0342] A nucleic acid comprising a first strand that is at least partially complementary to a portion of RNA transcribed from the target gene, and a second strand that is at least partially complementary to the first strand, wherein said first and second strands form a duplex region of at least 17 nucleosides in length, and wherein nucleosides of said second strand comprise a 2′ sugar, and abasic modification pattern as follows (5′-3′):
[0343] ia-ia-Me(s)Me(s)(Me)₆-(F)₃-(Me)₁₀, wherein ia represents an inverted abasic nucleoside, and(s) represents a phosphorothioate linkage, and
[0344] wherein nucleosides of said first strand comprise a 2′ sugar modification pattern as follows (5′-3′):

Me(s)F(s)Me-F-Me-F-(Me)₇-F-Me-F-(Me)₅(s)Me(s)
Me.

[0345] A nucleic acid comprising a first strand that is at least partially complementary to a portion of RNA transcribed from the target gene, and a second strand that is at least partially complementary to the first strand, wherein said first and second strands form a duplex region of at least 17 nucleosides in length, and wherein nucleosides of said second strand comprise a 2′ sugar, and abasic modification pattern as follows (5′-3′):
[0346] ia-ia-Me(s)Me(s)(Me)₆-(F)₃-(Me)₁₀, wherein ia represents an inverted abasic nucleoside, and(s) represents a phosphorothioate linkage, and
[0347] wherein nucleosides of said first strand comprise a 2′ sugar modification pattern as follows (5′-3′):

Me(s)F(s)(Me)₃-F-(Me)₇-(F-Me)₂-F-(Me)₃(s)Me(s)
Me.

[0348] A nucleic acid comprising a first strand that is at least partially complementary to a portion of RNA transcribed from the target gene, and a second strand that is at least partially complementary to the first strand, wherein said first and second strands form a duplex region of at least 17 nucleosides in length, and wherein nucleosides of said second strand comprise a 2′ sugar, and abasic modification pattern as follows (5′-3′):
[0349] ia-ia-Me(s)Me(s)(Me)₆-(F)₃-(Me)₁₀, wherein ia represents an inverted abasic nucleoside, and(s) represents a phosphorothioate linkage, and
[0350] wherein nucleosides of said first strand comprise a 2′ sugar modification pattern as follows (5′-3′):

Me(s)F(s)(Me)₃-F-(Me)₇-F-Me-F-(Me)₃-F-Me(s)
Me(s)Me.

[0351] A nucleic acid comprising a first strand that is at least partially complementary to a portion of RNA transcribed from the target gene, and a second strand that is at least partially complementary to the first strand, wherein said first and second strands form a duplex region of at least 17 nucleosides in length, and wherein nucleosides of said second strand comprise a 2′ sugar, and abasic modification pattern as follows (5′-3′):
[0352] ia-ia-Me(s)Me(s)(Me)₈-(F)₃-(Me)₁₀, wherein ia represents an inverted abasic nucleoside, and(s) represents a phosphorothioate linkage, and
[0353] wherein nucleosides of said first strand comprise a 2′ sugar modification pattern as follows (5′-3′):
[0354] Me(s)F(s)(Me)₃-X₁-Me-(F)₂-(Me)₄-F-Me-F-(Me)₅(s)Me(s)Me, wherein X₁ is a thermally destabilising modification.

[0355] A nucleic acid comprising a first strand that is at least partially complementary to a portion of RNA transcribed from the target gene, and a second strand that is at least partially complementary to the first strand, wherein said first and second strands form a duplex region of at least 17 nucleosides in length, and wherein nucleosides of said second strand comprise a 2′ sugar, and abasic modification pattern as follows (5′-3′);
[0356] ia-ia-Me(s)Me(s)(Me)₆-(F)₃-(Me)₁₀, wherein ia represents an inverted abasic nucleoside, and(s) represents a phosphorothioate linkage, and
[0357] wherein nucleosides of said first strand comprise a 2′ sugar modification pattern as follows (5′-3′):

Me(s)F(s)Me-F-Me-F-Me-(F)₂-(Me)₄-(F-Me)₂-
(Me)₄(s)Me(s)Me.

[0358] A nucleic acid comprising a first strand that is at least partially complementary to a portion of RNA transcribed from the target gene, and a second strand that is at least partially complementary to the first strand, wherein said first and second strands form a duplex region of at least 17 nucleosides in length, and wherein nucleosides of said second strand comprise a 2′ sugar, and abasic modification pattern as follows (5′-3′):
[0359] ia-ia-Me(s)Me(s)(Me)₆-(F)₃-(Me)₁₀, wherein ia represents an inverted abasic nucleoside, and(s) represents a phosphorothioate linkage, and
[0360] wherein nucleosides of said first strand comprise a 2′ sugar modification pattern as follows (5′-3′):

Me(s)F(s)(Me)₃-F-Me-(F)₂-(Me)₄-(F-Me)₂-F-
(Me)₃(s)Me(s)Me.

[0361] A nucleic acid comprising a first strand that is at least partially complementary to a portion of RNA transcribed from the target gene, and a second strand that is at least partially complementary to the first strand, wherein said first and second strands form a duplex region of at least 17 nucleosides in length, and wherein nucleosides of said second strand comprise a 2′ sugar, and abasic modification pattern as follows (5′-3′):
[0362] ia-ia-Me(s)Me(s)(Me)₆-(F)₃-(Me)₁₀, wherein ia represents an inverted abasic nucleoside, and(s) represents a phosphorothioate linkage, and
[0363] wherein nucleosides of said first strand comprise a 2′ sugar modification pattern as follows (5′-33):

Me(s)F(s)(Me)3-F-Me-(F)₂-(Me)₄-(F-Me)₂-(Me)₂-
F-Me(s)Me(s)Me.

[0364] Preferred modifications are as follows:

Modification pattern 1:
Second strand (5′-3′):
ia-ia-Me-Me-Me-Me-Me-Me-Me-Me-F-F-F-Me-Me-
Me-Me-Me-Me-Me-Me-Me-Me,
First strand (5′-3′):
Me-F-Me-Me-Me-X₁-Me-Me-Me-Me-Me-Me-Me-
F-Me-F-Me-Me-Me-Me-Me-Me-Me, wherein X₁ is a
thermally destabilising modification;
Or
Modification pattern 2:
Second strand (5′-3′):
ia-ia-Me-Me-Me-Me-Me-Me-Me-Me-F-F-F-Me-
Me-Me-Me-Me-Me-Me-Me-Me-Me,
First strand (5′-3′):
Me-F-Me-F-Me-F-Me-Me-Me-Me-Me-Me-Me-F-
Me-F-Me-Me-Me-Me-Me-Me-Me;
Or
Modification pattern 3:
Second strand (5′-3′):
ia-ia-Me-Me-Me-Me-Me-Me-Me-Me-F-F-F-Me-
Me-Me-Me-Me-Me-Me-Me-Me-Me,
First strand (5′-3′):
Me-F-Me-Me-Me-F-Me-Me-Me-Me-Me-Me-Me-
F-Me-F-Me-F-Me-Me-Me-Me-Me;
Or
Modification pattern 4:
Second strand (5′-3′):
ia-ia-Me-Me-Me-Me-Me-Me-Me-Me-F-F-F-Me-
Me-Me-Me-Me-Me-Me-Me-Me-Me,
First strand (5′-3′):
Me-F-Me-Me-Me-F-Me-Me-Me-Me-Me-Me-Me-F-
Me-F-Me-Me-Me-F-Me-Me-Me;
Or
Modification pattern 5:
Second strand (5′-3′):
ia-ia-Me-Me-Me-Me-Me-Me-Me-Me-F-F-F-Me-
Me-Me-Me-Me-Me-Me-Me-Me-Me,
First strand (5′-3′):
Me-F-Me-Me-Me-X₁-Me-F-F-Me-Me-Me-Me-F-
Me-F-Me-Me-Me-Me-Me-Me-Me, wherein X₁ is a
thermally destabilising modification;
Or
Modification pattern 6:
Second strand (5′-3′):
ia-ia-Me-Me-Me-Me-Me-Me-Me-Me-F-F-F-Me-
Me-Me-Me-Me-Me-Me-Me-Me-Me,
First strand (5′-3′):
Me-F-Me-F-Me-F-Me-F-F-Me-Me-Me-Me-F-Me-
F-Me-Me-Me-Me-Me-Me-Me;
Or
Modification pattern 7:
Second strand (5′-3′):
ia-ia-Me-Me-Me-Me-Me-Me-Me-Me-F-F-F-Me-
Me-Me-Me-Me-Me-Me-Me-Me-Me,
First strand (5′-3′):
Me-F-Me-Me-Me-F-Me-F-F-Me-Me-Me-Me-F-
Me-F-Me-F-Me-Me-Me-Me-Me;
Or
Modification pattern 8:
Second strand (5′-3′):
ia-ia-Me-Me-Me-Me-Me-Me-Me-Me-F-F-F-Me-
Me-Me-Me-Me-Me-Me-Me-Me-Me,
First strand (5′-3′):
Me-F-Me-Me-Me-F-Me-F-F-Me-Me-Me-Me-F-
Me-F-Me-Me-Me-F-Me-Me-Me,
wherein ia represents an inverted abasic
nucleoside.

[0365] Further preferred modifications are as follows:

Modification pattern 1:
Second strand (5′-3′):
ia-ia-Me(s)Me(s)Me-Me-Me-Me-Me-Me-F-F-F-
Me-Me-Me-Me-Me-Me-Me-Me-Me-Me,
First strand (5′-3′):
Me(s)F(s)Me-Me-Me-X₁-Me-Me-Me-Me-Me-Me-Me-
F-Me-F-Me-Me-Me-Me-Me(s)Me(s)Me, wherein X₁ is a
thermally destabilising modification;
Or
Modification pattern 2:
Second strand (5′-3′):
ia-ia-Me(s)Me(s)Me-Me-Me-Me-Me-Me-F-F-F-
Me-Me-Me-Me-Me-Me-Me-Me-Me-Me,
First strand (5′-3′):
Me(s)F(s)Me-F-Me-F-Me-Me-Me-Me-Me-Me-Me-F-
Me-F-Me-Me-Me-Me-Me(s)Me(s)Me;
Or
Modification pattern 3:
Second strand (5′-3′):
ia-ia-Me(s)Me(s)Me-Me-Me-Me-Me-Me-F-F-F-
Me-Me-Me-Me-Me-Me-Me-Me-Me-Me,
First strand (5′-3′):
Me(s)F(s)Me-Me-Me-F-Me-Me-Me-Me-Me-Me-Me-
F-Me-F-Me-F-Me-Me-Me(s)Me(s)Me;
Or
Modification pattern 4:
Second strand (5′-3′):
ia-ia-Me(s)Me(s)Me-Me-Me-Me-Me-Me-F-F-F-
Me-Me-Me-Me-Me-Me-Me-Me-Me-Me,
First strand (5′-3′):
Me(s)F(s)Me-Me-Me-F-Me-Me-Me-Me-Me-Me-Me-F-
Me-F-Me-Me-Me-F-Me(s)Me(s)Me;
Or
Modification pattern 5:
Second strand (5′-3′):
ia-ia-Me(s)Me(s)Me-Me-Me-Me-Me-Me-F-F-F-
Me-Me-Me-Me-Me-Me-Me-Me-Me-Me,
First strand (5′-3′):
Me(s)F(s)Me-Me-Me-X₁-Me-F-F-Me-Me-Me-Me-F-
Me-F-Me-Me-Me-Me-Me(s)Me(s)Me, wherein X₁ is a
thermally destabilising modification;
Or
Modification pattern 6:
Second strand (5′-3′):
ia-ia-Me(s)Me(s)Me-Me-Me-Me-Me-Me-F-F-F-
Me-Me-Me-Me-Me-Me-Me-Me-Me-Me,
First strand (5′-3′):
Me(s)F(s)Me-F-Me-F-Me-F-F-Me-Me-Me-Me-F-
Me-F-Me-Me-Me-Me-Me(s)Me(s)Me;
Or
Modification pattern 7:
Second strand (5′-3′):
ia-ia-Me(s)Me(s)Me-Me-Me-Me-Me-Me-F-F-F-
Me-Me-Me-Me-Me-Me-Me-Me-Me-Me,
First strand (5′-3′):
Me(s)F(s)Me-Me-Me-F-Me-F-F-Me-Me-Me-Me-F-
Me-F-Me-F-Me-Me-Me(s)Me(s)Me;
Or
Modification pattern 8:
Second strand (5′-3′):
ia-ia-Me(s)Me(s)Me-Me-Me-Me-Me-Me-F-F-F-Me-
Me-Me-Me-Me-Me-Me-Me-Me-Me,
First strand (5′-3′):
Me(s)F(s)Me-Me-Me-F-Me-F-F-Me-Me-Me-Me-F-
Me-F-Me-Me-Me-F-Me(s)Me(s)Me;
wherein (s) is a phosphorothioate internucleoside
linkage and ia represents an inverted abasic
nucleoside.

### Conjugation

[0366] Another modification of the nucleic acid e.g. RNA e.g. an siRNA of the invention involves linking the nucleic acid e.g. the siRNA to one or more ligand moieties e.g. to enhance the activity, cellular distribution, or cellular uptake of the nucleic acid e.g. siRNA e.g. into a cell.

[0367] In some embodiments, the ligand moiety described can be attached to a nucleic acid e.g. an siRNA oligonucleoside, via a linker that can be cleavable or non-cleavable. The term “linker” or “linking group” means an organic moiety that connects two parts of a compound, e.g., covalently attaches two parts of a compound.

[0368] The ligand can be attached to the 3′ or 5′ end of the sense strand.

[0369] The ligand is preferably conjugated to 3′ end of the sense strand of the nucleic acid e.g. an siRNA agent.

[0370] The invention therefore relates in a further aspect to a conjugate for inhibiting expression of a target gene in a cell, said conjugate comprising a nucleic acid portion and one or more ligand moieties, said nucleic acid portion comprising a nucleic acid as disclosed herein.

[0371] In one aspect the second strand of the nucleic acid is conjugated directly or indirectly (e.g. via a linker) to the one or more ligand moiety(s), wherein said ligand moiety is typically present at a terminal region of the second strand, preferably at the 3′ terminal region thereof.

[0372] In certain embodiments, the ligand moiety comprises a GalNAc or GalNAc derivative attached to the nucleic acid eg dsiRNA through a linker.

[0373] Therefore the invention relates to a conjugate wherein the ligand moiety comprises
[0374] i) one or more GalNAc ligands; and/or
[0375] ii) one or more GalNAc ligand derivatives, and/or
[0376] iii) one or more GalNAc ligands conjugated to said nucleic acid through a linker.

[0377] Said GalNAc ligand may be conjugated directly or indirectly to the 5′ or 3′ terminal region of the sense strand of the nucleic acid, preferably at the 3′ terminal region thereof.

[0378] GalNAc ligands are well known in the art and described in, inter alia, EP3775207A1.

[0379] In some embodiments, the GalNAc ligand is comprised in any one of the linkers shown in FIGS. 1 to 4 or FIG. 5 (Formula XI), wherein the “oligonucleotide” may be any nucleic acid disclosed herein. Accordingly, the “oligonucleotide” may comprise other bonds than a phosphodiester bond, such as one or more phosphorothioate bonds. Preferably, the nucleic acid according to the invention is a double stranded oligonucleoside as defined herein and the linker is conjugated to the second strand, more preferably to the 3′ terminal region of the second strand, via a phosphodiester bond.

[0380] In some embodiments, the GalNAc ligand is comprised in the linker shown in FIG. 3, wherein the “oligonucleotide” may be any nucleic acid disclosed herein. Accordingly, the “oligonucleotide” may comprise other bonds than a phosphodiester bond, such as one or more phosphorothioate bonds. Preferably, the nucleic acid according to the invention is a double stranded oligonucleoside as defined herein and the linker is conjugated to the second strand, more preferably to the 3′ terminal region of the second strand, via a phosphodiester bond.

[0381] In some embodiments, the GalNAc ligand is comprised in the linker shown in FIG. 5 (Formula XI), wherein the “oligonucleotide” may be any nucleic acid disclosed herein. Accordingly, the “oligonucleotide” may comprise other bonds than a phosphodiester bond, such as one or more phosphorothioate bonds. Preferably, the nucleic acid according to the invention is a double stranded oligonucleoside as defined herein and the linker is conjugated to the second strand, more preferably to the 3′ terminal region of the second strand, via a phosphodiester bond.

[0382] In some embodiments, the GalNAc ligand is comprised in any one of the linkers shown in FIGS. 1 to 4 or FIG. 5 (Formula XI), wherein the “oligonucleotide” represents a nucleic acid according to the invention, wherein the nucleic acid according to the invention comprises a modified or unmodified second strand comprising or consisting of SEQ ID NO: 260 or SEQ ID NO:272, preferably wherein the linker is conjugated to the 3′ terminal region of the second strand, i.e., to the 3′ terminal region of SEQ ID NO:260 or SEQ ID NO: 272, via a phosphodiester bond.

[0383] In some embodiments, the GalNAc ligand is comprised in the linker shown in FIG. 3, wherein the “oligonucleotide” represents a nucleic acid according to the invention, wherein the nucleic acid according to the invention comprises a modified or unmodified second strand comprising or consisting of SEQ ID NO:260 or SEQ ID NO:272, preferably wherein the linker is conjugated to the 3′ terminal region of the second strand, i.e., to the 3′ terminal region of SEQ ID NO:260 or SEQ ID NO:272, via a phosphodiester bond.

[0384] In some embodiments, the GalNAc ligand is comprised in the linker shown in FIG. 5 (Formula XI), wherein the “oligonucleotide” represents a nucleic acid according to the invention, wherein the nucleic acid according to the invention comprises a modified or unmodified second strand comprising or consisting of SEQ ID NO:260 or SEQ ID NO:272, preferably wherein the linker is conjugated to the 3′ terminal region of the second strand, i.e., to the 3′ terminal region of SEQ ID NO:260 or SEQ ID NO:272, via a phosphodiester bond.

[0385] In some embodiments, the GalNAc ligand is comprised in any one of the linkers shown in FIGS. 1 to 4 or FIG. 5 (Formula XI), wherein the “oligonucleotide” represents a nucleic acid according to the invention, wherein the nucleic acid according to the invention comprises a modified second strand comprising or consisting of SEQ ID NO:774 or SEQ ID NO: 778, preferably wherein the linker is conjugated to the 3′ terminal region of the second strand, i.e., to the 3′ terminal region of SEQ ID NO:774 or SEQ ID NO:778, via a phosphodiester bond.

[0386] In some embodiments, the GalNAc ligand is comprised in the linker shown in FIG. 3, wherein the “oligonucleotide” represents a nucleic acid according to the invention, wherein the nucleic acid according to the invention comprises a modified second strand comprising or consisting of SEQ ID NO:774 or SEQ ID NO:778, preferably wherein the linker is conjugated to the 3′ terminal region of the second strand, i.e., to the 3′ terminal region of SEQ ID NO:774 or SEQ ID NO:778, via a phosphodiester bond.

[0387] In some embodiments, the GalNAc ligand is comprised in the linker shown in FIG. 5 (Formula XI), wherein the “oligonucleotide” represents a nucleic acid according to the invention, wherein the nucleic acid according to the invention comprises a modified second strand comprising or consisting of SEQ ID NO:774 or SEQ ID NO:778, preferably wherein the linker is conjugated to the 3′ terminal region of the second strand, i.e., to the 3′ terminal region of SEQ ID NO:774 or SEQ ID NO:778, via a phosphodiester bond.

[0388] In some embodiments, the GalNAc ligand is comprised in any one of the linkers shown in FIGS. 1 to 4 or FIG. 5 (Formula XI), wherein the “oligonucleotide” represents a nucleic acid according to the invention, wherein the nucleic acid according to the invention comprises a modified first strand comprising or consisting of SEQ ID NO:764 and a modified second strand comprising or consisting of SEQ ID NO:774, preferably wherein the linker is conjugated to the 3′ terminal region of the second strand, i.e., to the 3′ terminal region of SEQ ID NO:774, via a phosphodiester bond.

[0389] In some embodiments, the GalNAc ligand is comprised in the linker shown in FIG. 3, wherein the “oligonucleotide” represents a nucleic acid according to the invention, wherein the nucleic acid according to the invention comprises a modified first strand comprising or consisting of SEQ ID NO:764 and a modified second strand comprising or consisting of SEQ ID NO: 774, preferably wherein the linker is conjugated to the 3′ terminal region of the second strand, i.e., to the 3′ terminal region of SEQ ID NO:774, via a phosphodiester bond.

[0390] In some embodiments, the GalNAc ligand is comprised in the linker shown in FIG. 5 (Formula XI), wherein the “oligonucleotide” represents a nucleic acid according to the invention, wherein the nucleic acid according to the invention comprises a modified first strand comprising or consisting of SEQ ID NO:764 and a modified second strand comprising or consisting of SEQ ID NO:774, preferably wherein the linker is conjugated to the 3′ terminal region of the second strand, i.e., to the 3′ terminal region of SEQ ID NO:774, via a phosphodiester bond.

[0391] In some embodiments, the GalNAc ligand is comprised in any one of the linkers shown in FIGS. 1 to 4 or FIG. 5 (Formula XI), wherein the “oligonucleotide” represents a nucleic acid according to the invention, wherein the nucleic acid according to the invention comprises a modified first strand comprising or consisting of SEQ ID NO:768 and a modified second strand comprising or consisting of SEQ ID NO:778, preferably wherein the linker is conjugated to the 3′ terminal region of the second strand, i.e., to the 3′ terminal region of SEQ ID NO:778, via a phosphodiester bond.

[0392] In some embodiments, the GalNAc ligand is comprised in the linker shown in FIG. 3, wherein the “oligonucleotide” represents a nucleic acid according to the invention, wherein the nucleic acid according to the invention comprises a modified first strand comprising or consisting of SEQ ID NO:768 and a modified second strand comprising or consisting of SEQ ID NO: 778, preferably wherein the linker is conjugated to the 3′ terminal region of the second strand, i.e., to the 3′ terminal region of SEQ ID NO:778, via a phosphodiester bond.

[0393] In some embodiments, the GalNAc ligand is comprised in the linker shown in FIG. 5 (Formula XI), wherein the “oligonucleotide” represents a nucleic acid according to the invention, wherein the nucleic acid according to the invention comprises a modified first strand comprising or consisting of SEQ ID NO:768 and a modified second strand comprising or consisting of SEQ ID NO:778, preferably wherein the linker is conjugated to the 3′ terminal region of the second strand, i.e., to the 3′ terminal region of SEQ ID NO:778, via a phosphodiester bond.

[0394] In some embodiments, the GalNAc ligand is comprised in the linker shown in FIG. 3, wherein the “oligonucleotide” represents a nucleic acid according to the invention, wherein the nucleic acid according to the invention comprises a modified first strand comprising or consisting of SEQ ID NO:764 and a modified second strand comprising or consisting of SEQ ID NO: 774, wherein the second strand has the following structure

[chemical structure]

[0395] wherein:
[0396] T represents a 2′Me ribose modification,
[0397] B represents the nucleoside bases of the first two basic nucleosides in the 5′ terminal region of SEQ ID NO:774, and
[0398] Z represents the remaining 19 contiguous basic nucleosides of SEQ ID NO:774.

[0399] In some embodiments, the GalNAc ligand is comprised in the linker shown in FIG. 5 (Formula XI), wherein the “oligonucleotide” represents a nucleic acid according to the invention, wherein the nucleic acid according to the invention comprises a modified first strand comprising or consisting of SEQ ID NO:764 and a modified second strand comprising or consisting of SEQ ID NO:774, wherein the second strand has the following structure

[chemical structure]

[0400] wherein:
[0401] T represents a 2′Me ribose modification,
[0402] B represents the nucleoside bases of the first two basic nucleosides in the 5′ terminal region of SEQ ID NO:774, and
[0403] Z represents the remaining 19 contiguous basic nucleosides of SEQ ID NO:774.

[0404] In some embodiments, the GalNAc ligand is comprised in the linker shown in FIG. 3, wherein the “oligonucleotide” represents a nucleic acid according to the invention, wherein the nucleic acid according to the invention comprises a modified first strand comprising or consisting of SEQ ID NO:768 and a modified second strand comprising or consisting of SEQ ID NO: 778, wherein the second strand has the following structure

[chemical structure]

[0405] wherein:
[0406] T represents a 2′Me ribose modification,
[0407] B represents the nucleoside bases of the first two basic nucleosides in the 5′ terminal region of SEQ ID NO:778, and
[0408] Z represents the remaining 19 contiguous basic nucleosides of SEQ ID NO:778.

[0409] In some embodiments, the GalNAc ligand is comprised in the linker shown in FIG. 5 (Formula XI), wherein the “oligonucleotide” represents a nucleic acid according to the invention, wherein the nucleic acid according to the invention comprises a modified first strand comprising or consisting of SEQ ID NO:768 and a modified second strand comprising or consisting of SEQ ID NO:778, wherein the second strand has the following structure

[chemical structure]

[0410] wherein:
[0411] T represents a 2′Me ribose modification,
[0412] B represents the nucleoside bases of the first two basic nucleosides in the 5′ terminal region of SEQ ID NO:778, and
[0413] Z represents the remaining 19 contiguous basic nucleosides of SEQ ID NO:778.

### Vector And Cell

[0414] In one aspect, the invention provides a cell containing a nucleic acid, such as inhibitory RNA [RNAi] as described herein.

[0415] In one aspect, the invention provides a cell comprising a vector as described herein.

### Pharmaceutically Acceptable Compositions

[0416] In one aspect, the invention provides a pharmaceutical composition for inhibiting expression of a target gene, the composition comprising a nucleic acid as disclosed herein.

[0417] The pharmaceutically acceptable composition may comprise an excipient and or carrier.

[0418] Some examples of materials which can serve as pharmaceutically-acceptable carriers include: (1) sugars, such as lactose, glucose and sucrose; (2) starches, such as corn starch and potato starch; (3) cellulose, and its derivatives, such as sodium carboxymethyl cellulose, ethyl cellulose and cellulose acetate; (4) powdered tragacanth; (5) malt; (6) gelatin; (7) lubricating agents, such as magnesium stearate, sodium lauryl sulfate and talc; (8) excipients, such as cocoa butter and suppository waxes; (9) oils, such as peanut oil, cottonseed oil, safflower oil, sesame oil, olive oil, corn oil and soybean oil; (10) glycols, such as propylene glycol; (11) polyols, such as glycerin, sorbitol, mannitol and polyethylene glycol; (12) esters, such as ethyl oleate and ethyl laurate; (13) agar; (14) buffering agents, such as magnesium hydroxide and aluminum hydroxide; (15) alginic acid; (16) pyrogen-free water; (17) isotonic saline; (18) Ringer's solution; (19) ethyl alcohol; (20) pH buffered solutions; (21) polyesters, polycarbonates and/or poly anhydrides; (22) bulking agents, such as polypeptides and amino acids (23) serum component, such as serum albumin, HDL and LDL; and (22) other non-toxic compatible substances employed in pharmaceutical formulations

[0419] Typical pharmaceutical carriers include, but are not limited to, binding agents (e.g., pregelatinized maize starch, polyvinylpyrrolidone or hydroxypropyl methylcellulose, etc.); fillers (e.g., lactose and other sugars, microcrystalline cellulose, pectin, gelatin, calcium sulfate, ethyl cellulose, polyacrylates or calcium hydrogen phosphate, etc.); lubricants (e.g., magnesium stearate, talc, silica, colloidal silicon dioxide, stearic acid, metallic stearates, hydrogenated vegetable oils, corn starch, polyethylene glycols, sodium benzoate, sodium acetate, etc.); disintegrants (e.g., starch, sodium starch glycolate, etc.), and wetting agents (e.g., sodium lauryl sulphate, etc).

[0420] Pharmaceutically acceptable organic or inorganic excipients suitable for non-parenteral administration which do not deleteriously react with nucleic acids can also be used to formulate the compositions of the present invention. Suitable pharmaceutically acceptable excipients include, but are not limited to, water, salt solutions, alcohols, polyethylene glycols, gelatin, lactose, amylose, magnesium stearate, tale, silicic acid, viscous paraffin, hydroxymethylcellulose, polyvinylpyrrolidone, and the like.

[0421] Formulations for topical administration of nucleic acids can include sterile and non-sterile aqueous solutions, non-aqueous solutions in common solvents such as alcohols, or solutions of the nucleic acids in liquid or solid oil bases. The solutions can also contain buffers, diluents and other suitable additives. Pharmaceutically acceptable organic or inorganic excipients suitable for non-parenteral administration which do not deleteriously react with nucleic acids can be used.

[0422] In one embodiment, the nucleic acid or composition is administered in an unbuffered solution. In certain embodiments, the unbuffered solution is saline or water. In other embodiments, the nucleic acid e.g. siRNA agent is administered in a buffered solution. In such embodiments, the buffer solution can comprise acetate, citrate, prolamine, carbonate, or phosphate, or any combination thereof. For example, the buffer solution can be phosphate buffered saline (PBS).

### Dosages

[0423] The pharmaceutical compositions of the invention may be administered in dosages sufficient to inhibit expression of a gene. In general, a suitable dose of a nucleic acid e.g. an siRNA of the invention will be in the range of about 0.001 to about 200.0 milligrams per kilogram body weight of the recipient per day, generally in the range of about 1 to 50 mg per kilogram body weight per day. Typically, a suitable dose of a nucleic acid e.g. an siRNA of the invention will be in the range of about 0.1 mg/kg to about 5.0 mg/kg, e.g., about 0.3 mg/kg and about 3.0 mg/kg.

[0424] A repeat-dose regimen may include administration of a therapeutic amount of a nucleic acid e.g. siRNA on a regular basis, such as every other day or once a year. In certain embodiments, the nucleic acid e.g. siRNA is administered about once per month to about once per quarter (i.e., about once every three months).

[0425] In various embodiments, the nucleic acid e.g. siRNA agent is administered at a dose of about 0.01 mg/kg to about 10 mg/kg or about 0.5 mg/kg to about 50 mg/kg. In some embodiments, the nucleic acid e.g. siRNA agent is administered at a dose of about 10 mg/kg to about 30 mg/kg. In certain embodiments, the nucleic acid e.g. siRNA agent is administered at a dose selected from about 0.5 mg/kg 1 mg/kg, 1.5 mg/kg, 3 mg/kg, 5 mg/kg, 10 mg/kg, and 30 mg/kg. In certain embodiments, the nucleic acid e.g. agent is administered about once per week, once per month, once every other two months, or once a quarter (i.e., once every three months) at a dose of about 0.1 mg/kg to about 5.0 mg/kg. In certain embodiments, the nucleic acid e.g. siRNA agent is administered to the subject once a week. In certain embodiments, the nucleic acid e.g. siRNA agent is administered to the subject once a month. In certain embodiments, the nucleic acid e.g. siRNA agent is administered once per quarter (i.e., every three months).

[0426] After an initial treatment regimen, the treatments can be administered on a less frequent basis. For example, after administration weekly or biweekly for three months, administration can be repeated once per month, for six months, or a year; or longer.

[0427] The pharmaceutical composition can be administered once daily, or administered as two, three, or more sub-doses at appropriate intervals throughout the day or even using continuous infusion or delivery through a controlled release formulation. In that case, the nucleic acid e.g. siRNA contained in each sub-dose must be correspondingly smaller in order to achieve the total daily dosage. The dosage unit can also be compounded for delivery over several days, e.g., using a conventional sustained release formulation which provides sustained release of the nucleic acid e.g. siRNA over a several day period. Sustained release formulations are well known in the art and are particularly useful for delivery of agents at a particular site, such as could be used with the agents of the present invention. In this embodiment, the dosage unit contains a corresponding multiple of the daily dose.

[0428] In other embodiments, a single dose of the pharmaceutical compositions can be long lasting, such that subsequent doses are administered at not more than 3, 4, or 5 day intervals, or at not more than 1, 2, 3, or 4 week intervals. In some embodiments of the invention, a single dose of the pharmaceutical compositions of the invention is administered once per week. In other embodiments of the invention, a single dose of the pharmaceutical compositions of the invention is administered bimonthly. In certain embodiments, the siRNA is administered about once per month to about once per quarter (i.e., about once every three months), or even every 6 months or 12 months.

[0429] Estimates of effective dosages and in vivo half-lives for the individual nucleic acid e.g. siRNAs encompassed by the invention can be made using conventional methodologies or on the basis of in vivo testing using an appropriate animal model, as known in the art.

[0430] The pharmaceutical compositions of the present invention can be administered in a number of ways depending upon whether local or systemic treatment is desired and upon the area to be treated. Administration can be topical (e.g., by a transdermal patch), pulmonary, e.g., by inhalation or insufflation of powders or aerosols, including by nebulizer; intratracheal, intranasal, epidermal and transdermal, oral or parenteral. Parenteral administration includes intravenous, intraarterial, subcutaneous, intraperitoneal, or intramuscular injection or infusion; subdermal, e.g., via an implanted device, or intracranial, e.g., by intraparenchymal, intrathecal or intraventricular administration. In certain preferred embodiments, the compositions are administered by intravenous infusion or injection. In certain embodiments, the compositions are administered by subcutaneous injection.

[0431] In one embodiment, the nucleic acid e.g. agent is administered to the subject subcutaneously

[0432] The nucleic acid e.g. siRNA can be delivered in a manner to target a particular tissue (e.g. in particular liver cells).

### Methods for Inhibiting HCII Gene Expression

[0433] The present invention also provides methods of inhibiting expression of HCII gene in a cell. The methods include contacting a cell with a nucleic acid of the invention e.g. siRNA agent, such as double stranded siRNA agent, in an amount effective to inhibit expression of the HCII gene in the cell, thereby inhibiting expression of the HCII gene in the cell. It is to be noted that a nucleic acid “for inhibiting the expression of HCII” is a nucleic acid that is capable of inhibiting HCII expression, preferably as described herein below.

[0434] Contacting of a cell with the nucleic acid e.g. an siRNA, such as a double stranded siRNA agent, may be done in vitro or in vivo. Contacting a cell in vivo with nucleic acid e.g. includes contacting a cell or group of cells within a subject, e.g., a human subject, with the nucleic acid e.g. siRNA. Combinations of in vitro and in vivo methods of contacting a cell are also possible. Contacting a cell may be direct or indirect, as discussed above. Furthermore, contacting a cell may be accomplished via a targeting ligand moiety, including any ligand moiety described herein or known in the art. In preferred embodiments, the targeting ligand moiety is a carbohydrate moiety, e.g. a GalNAc3 ligand, or any other ligand moiety that directs the siRNA agent to a site of interest.

[0435] The term “inhibiting,” as used herein, is used interchangeably with “reducing,” “silencing,” “downregulating”, “suppressing”, and other similar terms, and includes any level of inhibition.

[0436] In some embodiments of the methods of the invention, expression of HCII gene is inhibited by at least 30%, 35%, 40%, 45%, 50%, 55%, 60%, 65%, 70%, 75%, 80%, 85%, 90%, or 95%, or to below the level of detection of the assay, preferably when determined by qPCR as described herein and/or when the siRNA is introduced into the target cell by transfection. In certain embodiments, the methods include a clinically relevant inhibition of expression of HCII target gene e.g. as demonstrated by a clinically relevant outcome after treatment of a subject with an agent to reduce the expression of the gene.

[0437] In some embodiments, when transfected into the cells, the nucleic acid of the invention inhibits expression of the HCII gene with an IC50 value lower than 2000 pM, 1900 pM, 1800 pM, 1700 pM, 1600 pM, 1500 pM, 1400 pM, 1300 pM, 1200 pM, 1100 pM, 1000 pM, 900 pM, 800 pM, 700 pM, 600 pM, 500 pM, 400 pM, 300 pM, 200 pM or 100 pM, preferably when determined by qPCR, more preferably by reverse transcriptase (RT)-qPCR, as described herein.

[0438] In a preferred embodiment, when transfected into the cells, the nucleic acid of the invention inhibits expression of the HCII gene with an IC50 value lower than 2000 pM. In a more preferred embodiment, when transfected into the cells, the nucleic acid of the invention inhibits expression of the HCII gene with an IC50 value lower than 1000 pM. In an even more preferred embodiment, when transfected into the cells, the nucleic acid of the invention inhibits expression of the HCII gene with an IC50 value lower than 500 pM. In a most preferred embodiment, when transfected into the cells, the nucleic acid of the invention inhibits expression of the HCII gene with an IC50 value lower than 100 pM.

[0439] Inhibition of expression of the HCII gene may be quantified by the following method:
[0440] Huh7 cells (human hepatocyte-derived cell line, obtained from JCRB Cell Bank) may be maintained in Dulbecco's Modified Eagle Medium (DMEM) supplemented with 10% FBS at 37° C. in an atmosphere of 5% CO₂. Cells may then be transfected with siRNA duplexes targeting HCII mRNA or a negative control siRNA (siRNA-control; sense strand 5′-UUCUCCGAACGUGUCACGUTT-3′ (SEQ ID NO:788), antisense strand 5′-ACGUGACACGUUCGGAGAATT-3′ (SEQ ID NO:787)) using 10×3-fold serial dilutions over a final duplex concentration range of 20 nM to 1 pM. Transfection may be carried out by adding 9.7 μL Opti-MEM (ThermoFisher) plus 0.3 μL Lipofectamine RNAiMAX (ThermoFisher) to 10 μL of each siRNA duplex. The mixture may be incubated at room temperature for 15 minutes before being added to 100 μL of complete growth medium containing 20,000 Huh7 cells. Cells may be incubated for 24 hours at 37° C./5% CO₂ prior to total RNA purification using a RNeasy 96 Kit (Qiagen). Each duplex may be tested by transfection in duplicate wells in a single experiment.
[0441] cDNA synthesis may be performed using FastQuant RT (with gDNase) Kit (Tiangen). Real-time quantitative PCR (qPCR) may be performed on an ABI Prism 7900HT or ABI QuantStudio 7 with primers specific for human HCII (Hs00164821_m1) and human GAPDH (Hs02786624_g1) using FastStart Universal Probe Master Kit (Roche).
[0442] qPCR may be performed in duplicate on cDNA derived from each well and the mean cycle threshold (Ct) calculated. Relative HCII expression may be calculated from mean Ct values using the comparative Ct (ΔΔCt) method, normalised to GAPDH and relative to untreated cells. Maximum percent inhibition of HCII expression and IC50 values may be calculated using a four parameter (variable slope) model using GraphPad Prism 9.

[0443] Alternatively or in addition, inhibition of expression of the HCII gene may be characterized by a reduction of mean relative expression of the HCII gene.

[0444] In some embodiments, when cells are transfected with 0.1 nM of the nucleic acid of the invention, the mean relative expression of HCII is below 1, 0.9, 0.8, 0.7, 0.6, 0.5, or 0.4, preferably when determined by qPCR, more preferably by reverse transcriptase (RT)-qPCR, as described herein.

[0445] In some embodiments, when cells are transfected with 1 nM of the nucleic acid of the invention, the mean relative expression of HCII is below 1, 0.9, 0.8, 0.7, 0.6, 0.5, 0.4 or 0.3, preferably when determined by qPCR, more preferably by reverse transcriptase (RT)-qPCR, as described herein.

[0446] Mean relative expression of the HCII gene may be quantified by the following method:
[0447] Huh7 cells (human hepatocyte-derived cell line, obtained from JCRB Cell Bank) may be maintained in Dulbecco's Modified Eagle Medium (DMEM) supplemented with 10% FBS at 37° C. in at atmosphere of 5% CO₂. Cells may be transfected with siRNA duplexes targeting HCII mRNA or a negative control siRNA (siRNA-control; sense strand 5′-UUCUCCGAACGUGUCACGUTT-3′ (SEQ ID NO:788), antisense strand 5′-ACGUGACACGUUCGGAGAATT-3′ (SEQ ID NO:787)) at a final duplex concentration of 1 nM and 0.1 nM. Transfection may be carried out by adding 9.7 μL Opti-MEM (ThermoFisher) plus 0.3 μL Lipofectamine RNAiMAX (ThermoFisher) to 10 μL of each siRNA duplex. The mixture may be incubated at room temperature for 15 minutes before being added to 100 μL of complete growth medium containing 20,000 Huh7 cells. Cells may be incubated for 24 hours at 37° C./5% CO₂ prior to total RNA purification using a RNeasy 96 Kit (Qiagen). Each duplex may be tested by transfection in duplicate wells in two independent experiments.
[0448] cDNA synthesis may be performed using FastQuant RT (with gDNase) Kit (Tiangen). Real-time quantitative PCR (qPCR) may be performed on an ABI Prism 7900HT or ABI QuantStudio 7 with primers specific for human HCII (Hs00164821_m1) and human GAPDH (Hs02786624_g1) using FastStart Universal Probe Master Kit (Roche).
[0449] qPCR may be performed in duplicate on cDNA derived from each well and the mean Ct calculated. Relative HCII expression may be calculated from mean Ct values using the comparative Ct (ΔΔCt) method, normalised to GAPDH and relative to untreated cells.

[0450] Inhibition of the expression of HCII gene may be manifested by a reduction of the amount of mRNA of the target HCII gene in comparison to a suitable control.

[0451] In other embodiments, inhibition of the expression of HCII gene may be assessed in terms of a reduction of a parameter that is functionally linked to gene expression, e.g, protein expression or signaling pathways.

Methods of Treating or Preventing Diseases Associated with HCII Gene Expression

[0452] The present invention also provides methods of using nucleic acid e.g. an siRNA of the invention or a composition containing nucleic acid e.g. an siRNA of the invention to reduce or inhibit HCII gene expression in a cell. The methods include contacting the cell with a nucleic acid e.g. dsiRNA of the invention and maintaining the cell for a time sufficient to obtain degradation of the mRNA transcript of HCII, thereby inhibiting expression of the HCII gene in the cell. Reduction in gene expression can be assessed by any methods known in the art.

[0453] In the methods of the invention the cell may be contacted in vitro or in vivo, i.e., the cell may be within a subject.

[0454] A cell suitable for treatment using the methods of the invention may be any cell that expresses a gene of interest associated with disease related to a disorder of haemostasis, such as a disease related to a disorder of haemostasis, such as haemophilia.

[0455] The in vivo methods of the invention may include administering to a subject a composition containing a nucleic acid of the invention e.g. an siRNA, where the nucleic acid e.g. siRNA includes a nucleoside sequence that is complementary to at least a part of an RNA transcript of HCII gene of the mammal to be treated.

[0456] The present invention further provides methods of treatment of a subject in need thereof. The treatment methods of the invention include administering a nucleic acid such as an siRNA of the invention to a subject, e.g., a subject that would benefit from a reduction or inhibition of the expression of HCII gene, in a therapeutically effective amount e.g. a nucleic acid such as an siRNA targeting HCII or a pharmaceutical composition comprising the nucleic acid targeting a gene. The disease to be treated is related to a disorder of haemostasis, such as a disease related to a disorder of haemostasis, such as haemophilia

[0457] Haemophilia, or hemophilia is a mostly inherited genetic disorder that impairs the body's ability to make blood clots, a process needed to stop bleeding. This results in subjects bleeding for a longer time after an injury, easy bruising, and an increased risk of bleeding inside joints or the brain. Subjects with a mild case of the disease may have symptoms only after an accident or during surgery. Bleeding into a joint, also referred to as haemarthrosis, can result in permanent damage while bleeding in the brain can result in long term headaches, seizures, or a decreased level of consciousness.

[0458] There are two main types of haemophilia: haemophilia A, which occurs due to low amounts of clotting factor VIII, and haemophilia B, which occurs due to low levels of clotting factor IX. They are typically inherited from one's parents through an X chromosome carrying a nonfunctional gene. Rarely a new mutation may occur during early development or haemophilia may develop later in life due to antibodies forming against a clotting factor. Other types include haemophilia C, which occurs due to low levels of factor XI, Von Willebrand disease, which occurs due to low levels of a substance called von Willebrand factor, and parahaemophilia, which occurs due to low levels of factor V. Haemophilia A, B, and C prevent the intrinsic pathway from functioning properly; this clotting pathway is necessary when there is damage to the endothelium of a blood vessel. Acquired haemophilia is associated with cancers, autoimmune disorders, and pregnancy. Diagnosis is by testing the blood for its ability to clot and its levels of clotting factors.

[0459] In certain embodiments, the nucleic acid of the present invention is suitable for treatment, or for treatment of haemophilia A, B and/or C. In certain embodiments, the nucleic acid of the present invention is suitable for treatment, or for treatment of haemophilia A and/or B. In certain embodiments, the nucleic acid of the present invention is suitable for treatment, or for treatment of acquired haemophilia. In certain embodiments, the nucleic acid of the present invention is suitable for treatment, or for treatment of Willebrand disease. In certain embodiments, the nucleic acid of the present invention is suitable for treatment, or for treatment of parahaemophilia.

[0460] Without wishing to being bound by theory, treatment with the nucleic acid of the invention results in a boost of clotting factor levels such that bleeding can be reduced or prevented. Thus, in a preferred embodiment, treatment with the nucleic acid of the invention reduces or prevents bleeding episodes in a subject suffering from haemophilia. In another preferred embodiment, treatment with the nucleic acid of the invention reduces or prevents bleeding into a joint of a subject suffering from haemophilia. In certain embodiments, treatment with the nucleic acid of the invention reduces or prevents bleeding into a muscle or into the brain of a subject suffering from haemophilia.

[0461] An nucleic acid e.g. siRNA of the invention may be administered as a “free” nucleic acid or “free siRNA, administered in the absence of a pharmaceutical composition. The naked nucleic acid may be in a suitable buffer solution. The buffer solution may comprise acetate, citrate, prolamine, carbonate, or phosphate, or any combination thereof. In one embodiment, the buffer solution is phosphate buffered saline (PBS). The pH and osmolarity of the buffer solution can be adjusted such that it is suitable for administering to a subject.

[0462] Alternatively, a nucleic acid e.g. siRNA of the invention may be administered as a pharmaceutical composition, such as a dsiRNA liposomal formulation.

[0463] In one embodiment, the method includes administering a composition featured herein such that expression of HCII gene is decreased, such as for about 1, 2, 3, 4, 5, 6, 7, 8, 12, 16, 18, 24 hours, 28, 32, or about 36 hours. In one embodiment, expression of HCII target gene is decreased for an extended duration, e.g., at least about two, three, four days or more, e.g., about one week, two weeks, three weeks, or four weeks or longer, e.g., about 1 month, 2 months, or 3 months.

[0464] Subjects can be administered a therapeutic amount of nucleic acid e.g. siRNA, such as about 0.01 mg/kg to about 200 mg/kg, so as to treat disease related to a disorder of haemostasis, such as a disease related to a disorder of haemostasis, such as haemophilia.

[0465] The nucleic acid e.g. siRNA can be administered by intravenous infusion over a period of time, on a regular basis. In certain embodiments, after an initial treatment regimen, the treatments can be administered on a less frequent basis. Administration of the siRNA can reduce gene product levels of HCII target gene, e.g., in a cell or tissue of the patient by at least about 20%, 25%, 30%, 35%, 40%, 45%, 50%, 55%, 60%, 65%, 70%, 75%, 80%, 85%, 90%, or 95%, or below the level of detection of the assay method used. In certain embodiments, administration results in clinical stabilization or preferably clinically relevant reduction of at least one sign or symptom of a HCII gene-associated disorder.

[0466] Alternatively, the nucleic acid e.g. siRNA can be administered subcutaneously, i.e., by subcutaneous injection. One or more injections may be used to deliver the desired daily dose of nucleic acid e.g. siRNA to a subject. The injections may be repeated over a period of time. The administration may be repeated on a regular basis. In certain embodiments, after an initial treatment regimen, the treatments can be administered on a less frequent basis. A repeat-dose regimen may include administration of a therapeutic amount of nucleic acid on a regular basis, such as every other day or to once a year. In certain embodiments, the nucleic acid is administered about once per month to about once per quarter (i.e., about once every three months).

[0467] In one aspect the present invention may be applied in the compounds, processes, compositions or uses of the following Sentences numbered 1-101 wherein reference to any Formula in the Sentences 1-101 refers only to those Formulas that are defined within Sentences 1-101. These formulae are reproduced in FIG. 5. Specifically, an oligonucleoside moiety as represented by Z in any of the following sentences can comprise a nucleic acid for inhibiting expression of HCII as defined in any of the claims hereinafter.
[0468] 1. A compound comprising the following structure:

[chemical structure]

[0469] wherein:
[0470] R₁ at each occurrence is independently selected from the group consisting of hydrogen, methyl and ethyl;
[0471] R₂ is selected from the group consisting of hydrogen, hydroxy, —OC₁₋₃alkyl, —C(═O)OC₁₋₃alkyl, halo and nitro;
[0472] X₁ and X₂ at each occurrence are independently selected from the group consisting of methylene, oxygen and sulfur;
[0473] m is an integer of from 1 to 6;
[0474] n is an integer of from 1 to 10;
[0475] q, r, s, t, v are independently integers from 0 to 4, with the proviso that:
[0476] (i) q and r cannot both be 0 at the same time; and
[0477] (ii) s, t and v cannot all be 0 at the same time;
[0478] Z is an oligonucleoside moiety.
[0479] 2. A compound according to Sentence 1, wherein R₁ is hydrogen at each occurrence.
[0480] 3. A compound according to Sentence 1, wherein R₁ is methyl.
[0481] 4. A compound according to Sentence 1, wherein R₁ is ethyl.
[0482] 5. A compound according to any of Sentences 1 to 4, wherein R₂ is hydroxy.
[0483] 6. A compound according to any of Sentences 1 to 4, wherein R₂ is halo.
[0484] 7. A compound according to Sentence 6, wherein R₂ is fluoro.
[0485] 8. A compound according to Sentence 6, wherein R₂ is chloro.
[0486] 9. A compound according to Sentence 6, wherein R₂ is bromo.
[0487] 10. A compound according to Sentence 6, wherein R₂ is iodo.
[0488] 11. A compound according to Sentence 6, wherein R₂ is nitro.
[0489] 12. A compound according to any of Sentences 1 to 11, wherein X₁ is methylene.
[0490] 13. A compound according to any of Sentences 1 to 11, wherein X₁ is oxygen.
[0491] 14. A compound according to any of Sentences 1 to 11, wherein X₁ is sulfur.
[0492] 15. A compound according to any of Sentences 1 to 14, wherein X₂ is methylene.
[0493] 16. A compound according to any of Sentences 1 to 15, wherein X₂ is oxygen.
[0494] 17. A compound according to any of Sentences 1 to 16, wherein X₂ is sulfur.
[0495] 18. A compound according to any of Sentences 1 to 17, wherein m=3.
[0496] 19. A compound according to any of Sentences 1 to 18, wherein n=6.
[0497] 20. A compound according to Sentences 13 and 15, wherein X₁ is oxygen and X₂ is methylene, and preferably wherein:

$$q = 1 ,$$

$$r = 2 ,$$

$$s = 1 ,$$

$$t = 1 ,$$

$$v = 1.$$

[0498] 21. A compound according to Sentences 12 and 15, wherein both X₁ and X₂ are methylene, and preferably wherein:

$$q = 1 ,$$

$$r = 3 ,$$

$$s = 1 ,$$

$$t = 1 ,$$

$$v = 1 .$$

[0499] 22. A compound according to any of Sentences 1 to 21, wherein Z is:

[chemical structure]

[0500] wherein:
[0501] Z₁, Z₂, Z₃, Z₄ are independently at each occurrence oxygen or sulfur; and
[0502] one the bonds between P and Z₂, and P and Z₃ is a single bond and the other bond is a double bond.
[0503] 23. A compound according to Sentence 22, wherein said oligonucleoside is an RNA compound capable of modulating, preferably inhibiting, expression of a target gene.
[0504] 24. A compound according to Sentence 23, wherein said RNA compound comprises an RNA duplex comprising first and second strands, wherein the first strand is at least partially complementary to an RNA sequence of a target gene, and the second strand is at least partially complementary to said first strand, and wherein each of the first and second strands have 5′ and 3′ ends.
[0505] 25. A compound according to Sentence 24, wherein the RNA compound is attached at the 5′ end of its second strand to the adjacent phosphate.
[0506] 26. A compound according to Sentence 24, wherein the RNA compound is attached at the 3′ end of its second strand to the adjacent phosphate.
[0507] 27. A compound of Formula (II):

[chemical structure]

[0508] 28. A compound of Formula (III):

[chemical structure]

[0509] 29. A compound according to Sentence 27 or 28, wherein the oligonucleoside comprises an RNA duplex comprising first and second strands, wherein the first strand is at least partially complementary to an RNA sequence of a target gene, and the second strand is at least partially complementary to said first strand, and wherein each of the first and second strands have 5′ and 3′ ends, and wherein said RNA duplex is attached at the 5′ end of its second strand to the adjacent phosphate.
[0510] 30. A composition comprising a compound of Formula (II) as defined in Sentence 27, and a compound of Formula (III) as defined in Sentence 28, optionally dependent on Sentence 29.
[0511] 31. A composition according to Sentence 30, wherein said compound of Formula (III) as defined in Sentence 28 is present in an amount in the range of 10 to 15% by weight of said composition.
[0512] 32. A compound of Formula (IV):

[chemical structure]

[0513] 33. A compound of Formula (V):

[chemical structure]

[0514] 34. A compound according to Sentence 32 or 33, wherein the oligonucleoside comprises an RNA duplex comprising first and second strands, wherein the first strand is at least partially complementary to an RNA sequence of a target gene, and the second strand is at least partially complementary to said first strand, and wherein each of the first and second strands have 5′ and 3′ ends, and wherein said RNA duplex is attached at the 3′ end of its second strand to the adjacent phosphate.
[0515] 35. A composition comprising a compound of Formula (IV) as defined in Sentence 32, and a compound of Formula (V) as defined in Sentence 33, optionally dependent on Sentence 34.
[0516] 36. A composition according to Sentence 35, wherein said compound of Formula (V) as defined in Sentence 33 is present in an amount in the range of 10 to 15% by weight of said composition.
[0517] 37. A compound as defined in any of Sentences 1 to 29, or 32 to 34, wherein the oligonucleoside comprises an RNA duplex which further comprises one or more riboses modified at the 2′ position, preferably a plurality of riboses modified at the 2′ position.
[0518] 38. A compound according to Sentence 37, wherein the modifications are chosen from 2′-O-methyl, 2′-deoxy-fluoro, and 2′-deoxy.
[0519] 39. A compound according to any of Sentences 1 to 29, or 32 to 34, or 37 to 38, wherein the oligonucleoside further comprises one or more degradation protective moieties at one or more ends.
[0520] 40. A compound according to Sentence 39, wherein said one or more degradation protective moieties are not present at the end of the oligonucleoside strand that carries the ligand moieties, and/or wherein said one or more degradation protective moieties is selected from phosphorothioate internucleoside linkages, phosphorodithioate internucleoside linkages and inverted abasic nucleosides, wherein said inverted abasic nucleosides are present at the distal end of the strand that carries the ligand moieties.
[0521] 41. A compound according to any of Sentences 1 to 29, or 32 to 34, or 37 to 40, wherein said ligand moiety as depicted in Formula (I) in Sentence 1 comprises one or more ligands.
[0522] 42. A compound according to Sentence 41, wherein said ligand moiety as depicted in Formula (I) in Sentence 1 comprises one or more carbohydrate ligands.
[0523] 43. A compound according to Sentence 42, wherein said one or more carbohydrates can be a monosaccharide, disaccharide, trisaccharide, tetrasaccharide, oligosaccharide or polysaccharide.
[0524] 44. A compound according to Sentence 43, wherein said one or more carbohydrates comprise one or more galactose moieties, one or more lactose moieties, one or more N-AcetylGalactosamine moieties, and/or one or more mannose moieties.
[0525] 45. A compound according to Sentence 44, wherein said one or more carbohydrates comprise one or more N-Acetyl-Galactosamine moieties.
[0526] 46. A compound according to Sentence 45, which comprises two or three N-AcetylGalactosamine moieties.
[0527] 47. A compound according to any of Sentences 41 to 46, wherein said one or more ligands are attached in a linear configuration, or in a branched configuration.
[0528] 48. A compound according to Sentence 47, wherein said one or more ligands are attached as a biantennary or triantennary branched configuration.
[0529] 49. A compound according to Sentences 46 to 48, wherein said moiety:

[chemical structure]

[0530] as depicted in Formula (I) in Sentence 1 is any of Formulae (VIa), (VIb) or (VIc), preferably Formula (VIa):

[chemical structure]

[0531] wherein:
[0532] Ar is hydrogen, or a suitable hydroxy protecting group;
[0533] a is an integer of 2 or 3; and
[0534] b is an integer of 2 to 5; or

[chemical structure]

[0535] wherein:
[0536] Ar is hydrogen, or a suitable hydroxy protecting group;
[0537] a is an integer of 2 or 3; and
[0538] c and d are independently integers of 1 to 6; or

[chemical structure]

[0539] wherein:
[0540] Ar is hydrogen, or a suitable hydroxy protecting group;
[0541] a is an integer of 2 or 3; and
[0542] e is an integer of 2 to 10.
[0543] 50. A compound according to Sentences 46 to 48, wherein said moiety:

[chemical structure]

[0544] as depicted in Formula (I) in Sentence 1 is Formula (VII):

[chemical structure]

[0545] wherein:
[0546] Ar is hydrogen;
[0547] a is an integer of 2 or 3.
[0548] 51. A compound according to Sentence 49 or 50, wherein a=2.
[0549] 52. A compound according to Sentence 49 or 50, wherein a=3.
[0550] 53. A compound according to Sentence 49, wherein b=3.
[0551] 54. A compound of Formula (VIII):

[chemical structure]

[0552] 55. A compound of Formula (IX):

[chemical structure]

[0553] 56. A compound according to Sentence 54 or 55, wherein the oligonucleoside comprises an RNA duplex comprising first and second strands, wherein the first strand is at least partially complementary to an RNA sequence of a target gene, and the second strand is at least partially complementary to said first strand, and wherein each of the first and second strands have 5′ and 3′ ends, and wherein said RNA duplex is attached at the 5′ end of its second strand to the adjacent phosphate.
[0554] 57. A composition comprising a compound of Formula (VIII) as defined in Sentence 54, and a compound of Formula (IX) as defined in Sentence 55, optionally dependent on Sentence 56.
[0555] 58. A composition according to Sentence 57, wherein said compound of Formula (IX) as defined in Sentence 55 is present in an amount in the range of 10 to 15% by weight of said composition.
[0556] 59. A compound of Formula (X):

[chemical structure]

[0557] 60. A compound of Formula (XI):

[chemical structure]

[0558] 61. A compound according to Sentence 59 or 60, wherein the oligonucleoside comprises an RNA duplex comprising first and second strands, wherein the first strand is at least partially complementary to an RNA sequence of a target gene, and the second strand is at least partially complementary to said first strand, and wherein each of the first and second strands have 5′ and 3′ ends, and wherein said RNA duplex is attached at the 3′ end of its second strand to the adjacent phosphate.
[0559] 62. A composition comprising a compound of Formula (X) as defined in Sentence 59, and a compound of Formula (XI) as defined in Sentence 60, optionally dependent on Sentence 61.
[0560] 63. A composition according to Sentence 62, wherein said compound of Formula (XI) as defined in Sentence 60 is present in an amount in the range of 10 to 15% by weight of said composition.
[0561] 64. A compound as defined in any of Sentences 54 to 63, wherein the oligonucleoside comprises an RNA duplex which further comprises one or more riboses modified at the 2′ position, preferably a plurality of riboses modified at the 2′ position.
[0562] 65. A compound according to Sentence 64, wherein the modifications are chosen from 2′-O-methyl, 2′-deoxy-fluoro, and 2′-deoxy.
[0563] 66. A compound according to any of Sentences 54 to 65, wherein the oligonucleoside further comprises one or more degradation protective moieties at one or more ends.
[0564] 67. A compound according to Sentence 66, wherein said one or more degradation protective moieties are not present at the end of the oligonucleoside strand that carries the ligand moieties, and/or wherein said one or more degradation protective moieties is selected from phosphorothioate internucleoside linkages, phosphorodithioate internucleoside linkages and inverted abasic nucleosides, wherein said inverted abasic nucleosides are present at the distal end of the strand that carries the ligand moieties, as shown in any of Formulae (VIII), (IX), (X) or (XI) in any of Sentences 54, 55, 59 or 60.
[0565] 68. A process of preparing a compound according to any of Sentences 1 to 29, 32 to 34, 37 to 56, 59 to 61, and 64 to 67, and/or a composition according to any of Sentences 30, 31, 35, 36, 57, 58, 62, 63, which comprises reacting compounds of Formulae (XII) and (XIII):

[chemical structure]

[0566] herein:
[0567] R₁ at each occurrence is independently selected from the group consisting of hydrogen, methyl and ethyl;
[0568] R₂ is selected from the group consisting of hydrogen, hydroxy, —OC₁₋₃alkyl, —C(═O)OC₁₋₃alkyl, halo and nitro;
[0569] X₁ and X₂ at each occurrence are independently selected from the group consisting of methylene, oxygen and sulfur;
[0570] m is an integer of from 1 to 6;
[0571] n is an integer of from 1 to 10;
[0572] q, r, s, t, v are independently integers from 0 to 4, with the proviso that:
[0573] (i) q and r cannot both be 0 at the same time; and
[0574] (ii) s, t and v cannot all be 0 at the same time;
[0575] Z is an oligonucleoside moiety;
[0576] and where appropriate carrying out deprotection of the ligand and/or annealing of a second strand for the oligonucleoside moiety.
[0577] 69. A process according to Sentence 68, wherein a compound of Formula (XII) is prepared by reacting compounds of Formulae (XIV) and (XV):

[chemical structure]

[0578] R₁ at each occurrence is independently selected from the group consisting of hydrogen, methyl and ethyl;
[0579] R₂ is selected from the group consisting of hydrogen, hydroxy, —OC₁₋₃alkyl, —C(═O)OC₁₋₃alkyl, halo and nitro;
[0580] X₁ and X₂ at each occurrence are independently selected from the group consisting of methylene, oxygen and sulfur;
[0581] q, r, s, t, v are independently integers from 0 to 4, with the proviso that:
[0582] (i) q and r cannot both be 0 at the same time; and
[0583] (ii) s, t and v cannot all be 0 at the same time;
[0584] Z is an oligonucleoside moiety.
[0585] 70. A process according to Sentence 68, to prepare a compound according to any of Sentences 20, 25, 27, 29, 54, 56, and/or a composition according to any of Sentences 30, 31, 57, 58, wherein:
[0586] compound of Formula (XII) is Formula (XIIa):

[chemical structure]

[0587] and compound of Formula (XIII) is Formula (XIIIa):

[chemical structure]

[0588] wherein the oligonucleoside comprises an RNA duplex comprising first and second strands, wherein the first strand is at least partially complementary to an RNA sequence of a target gene, and the second strand is at least partially complementary to said first strand, and wherein each of the first and second strands have 5′ and 3′ ends, and wherein said RNA duplex is attached at the 5′ end of its second strand to the adjacent phosphate.
[0589] 71. A process according to Sentence 68, to prepare a compound according to any of Sentences 20, 25, 28, 29, 55, 56, and/or a composition according to any of Sentences 30, 31, 57, 58, wherein:
[0590] compound of Formula (XII) is Formula (XIIb):

[chemical structure]

[0591] and compound of Formula (XIII) is Formula (XIIIa):

[chemical structure]

[0592] wherein the oligonucleoside comprises an RNA duplex comprising first and second strands, wherein the first strand is at least partially complementary to an RNA sequence of a target gene, and the second strand is at least partially complementary to said first strand, and wherein each of the first and second strands have 5′ and 3′ ends, and wherein said RNA duplex is attached at the 5′ end of its second strand to the adjacent phosphate.
[0593] 72. A process according to Sentence 68, to prepare a compound according to any of Sentences 21, 26, 32, 34, 59, 61, and/or a composition according to any of Sentences 35, 36, 62, 63, wherein:
[0594] compound of Formula (XII) is Formula (XIIc):

[chemical structure]

[0595] and compound of Formula (XIII) is Formula (XIIIa):

[chemical structure]

[0596] wherein the oligonucleoside comprises an RNA duplex comprising first and second strands, wherein the first strand is at least partially complementary to an RNA sequence of a target gene, and the second strand is at least partially complementary to said first strand, and wherein each of the first and second strands have 5′ and 3′ ends, and wherein said RNA duplex is attached at the 3′ end of its second strand to the adjacent phosphate.
[0597] 73. A process according to Sentence 68, to prepare a compound according to any of Sentences 21, 26, 33, 34, 60, 61, and/or a composition according to any of Sentences 35, 36, 62, 63, wherein:
[0598] compound of Formula (XII) is Formula (XIId):

[chemical structure]

[0599] and compound of Formula (XIII) is Formula (XIIIa):

[chemical structure]

[0600] wherein the oligonucleoside comprises an RNA duplex comprising first and second strands, wherein the first strand is at least partially complementary to an RNA sequence of a target gene, and the second strand is at least partially complementary to said first strand, and wherein each of the first and second strands have 5′ and 3′ ends, and wherein said RNA duplex is attached at the 3′ end of its second strand to the adjacent phosphate.
[0601] 74. A process according to any of Sentences 70 to 73, wherein:
[0602] compound of Formula (XIIIa) is Formula (XIIIb):

[chemical structure]

[0603] 75. A process according to Sentences 69, as dependent on Sentences 70 to 73, wherein:
[0604] compound of Formula (XIV) is either Formula (XIVa) or Formula (XIVb):

[chemical structure]

[0605] and compound of Formula (XV) is either Formula (XVa) or Formula (XIVb):

[chemical structure]

[0606] wherein the oligonucleoside comprises an RNA duplex comprising first and second strands, wherein the first strand is at least partially complementary to an RNA sequence of a target gene, and the second strand is at least partially complementary to said first strand, and wherein each of the first and second strands have 5′ and 3′ ends, and wherein (i) said RNA duplex is attached at the 5′ end of its second strand to the adjacent phosphate in Formula (XVa), or (ii) said RNA duplex is attached at the 3′ end of its second strand to the adjacent phosphate in Formula (XVb).
[0607] 76. A compound of Formula (XII):

[chemical structure]

[0608] wherein:
[0609] R₁ at each occurrence is independently selected from the group consisting of hydrogen, methyl and ethyl;
[0610] R₂ is selected from the group consisting of hydrogen, hydroxy, —OC₁₋₃alkyl, —C(═O)OC₁₋₃alkyl, halo and nitro;
[0611] X₁ and X₂ at each occurrence are independently selected from the group consisting of methylene, oxygen and sulfur;
[0612] q, r, s, t, v are independently integers from 0 to 4, with the proviso that:
[0613] (i) q and r cannot both be 0 at the same time; and
[0614] (ii) s, t and v cannot all be 0 at the same time;
[0615] Z is an oligonucleoside moiety.
[0616] 77. A compound of Formula (XIIa):

[chemical structure]

[0617] 78. A compound of Formula (XIIb):

[chemical structure]

[0618] 79. A compound of Formula (XIIc):

[chemical structure]

[0619] 80. A compound of Formula (XIId):

[chemical structure]

[0620] 81. A compound of Formula (XIII):

[chemical structure]

[0621] wherein:
[0622] R₁ at each occurrence is independently selected from the group consisting of hydrogen, methyl and ethyl;
[0623] m is an integer of from 1 to 6;
[0624] n is an integer of from 1 to 10.
[0625] 82. A compound of Formula (XIIIa):

[chemical structure]

[0626] 83. A compound of Formula (XIIIb):

[chemical structure]

[0627] 84. A compound of Formula (XIV):

[chemical structure]

[0628] wherein:
[0629] R₁ is selected from the group consisting of hydrogen, methyl and ethyl;
[0630] R₂ is selected from the group consisting of hydrogen, hydroxy, —OC₁₋₃alkyl, —C(═O)OC₁₋₃alkyl, halo and nitro;
[0631] X₂ is selected from the group consisting of methylene, oxygen and sulfur;
[0632] s, t, v are independently integers from 0 to 4, with the proviso that s, t and v cannot all be 0 at the same time.
[0633] 85. A compound of Formula (XIVa):

[chemical structure]

[0634] 86. A compound of Formula (XIVb):

[chemical structure]

[0635] 87. A compound of Formula (XV):

[chemical structure]

[0636] wherein:
[0637] R₁ at each occurrence is independently selected from the group consisting of hydrogen, methyl and ethyl;
[0638] X₁ is selected from the group consisting of methylene, oxygen and sulfur,
[0639] q and r are independently integers from 0 to 4, with the proviso that q and r cannot both be 0 at the same time;
[0640] Z is an oligonucleoside moiety
[0641] 88. A compound of Formula (XVa):

[chemical structure]

[0642] 89. A compound of Formula (XVb):

[chemical structure]

[0643] 90 Use of a compound according to any of Sentences 76, 81 to 84, 87, for the preparation of a compound according to any of Sentences 1 to 29, 32 to 34, 37 to 56, 59 to 61, and 64 to 67, and/or a composition according to any of Sentences 30, 31, 35, 36, 57, 58, 62 and 63.
[0644] 91. Use of a compound according to Sentence 85, for the preparation of a compound according to any of Sentences 1 to 29, 32 to 34, 37 to 56, 59 to 61, and 64 to 67, and/or a composition according to any of Sentences 30, 31, 35, 36, 57, 58, 62 and 63, wherein R₂═F.
[0645] 92. Use of a compound according to Sentence 86, for the preparation of a compound according to any of Sentences 1 to 29, 32 to 34, 37 to 56, 59 to 61, and 64 to 67, and/or a composition according to any of Sentences 30, 31, 35, 36, 57, 58, 62 and 63, wherein R₂═OH.
[0646] 93. Use of a compound according to Sentence 77, for the preparation of a compound according to any of Sentences 20, 25, 27, 29, 54, 56, and/or a composition according to any of Sentences 30, 31, 57, 58.
[0647] 94. Use of a compound according to Sentence 78, for the preparation of a compound according to any of Sentences 20, 25, 28, 29, 55, 56, and/or a composition according to any of Sentences 30, 31, 57, 58.
[0648] 95. Use of a compound according to Sentence 79, for the preparation of a compound according to any of Sentences 21, 26, 32, 34, 59, 61, and/or a composition according to any of Sentences 35, 36, 62, 63.
[0649] 96. Use of a compound according to Sentence 80, for the preparation of a compound according to any of Sentences 21, 26, 33, 34, 60, 61, and/or a composition according to any of Sentences 35, 36, 62, 63.
[0650] 97 Use of a compound according to Sentence 88, for the preparation of a compound according to any of Sentences 20, 25, 27 to 29, 54 to 56, and/or a composition according to any of Sentences 30, 31, 57, 58.
[0651] 98. Use of a compound according to Sentence 89, for the preparation of a compound according to any of Sentences 21, 26, 32 to 34, 59 to 61, and/or a composition according to any of Sentences 35, 36, 62, 63.
[0652] 99. A compound or composition obtained, or obtainable by a process according to any of Sentences 68 to 75.
[0653] 100. A pharmaceutical composition comprising of a compound according to any of Sentences 1 to 29, 32 to 34, 37 to 56, 59 to 61, and 64 to 67, and/or a composition according to any of Sentences 30, 31, 35, 36, 57, 58, 62 and 63, together with a pharmaceutically acceptable carrier, diluent or excipient.
[0654] 101. A compound according to any of Sentences 1 to 29, 32 to 34, 37 to 56, 59 to 61, and 64 to 67, and/or a composition according to any of Sentences 30, 31, 35, 36, 57, 58, 62 and 63, for use in therapy.

[0655] In another aspect the present invention may be applied in the compounds, processes, compositions or uses of the following Clauses numbered 1-56 wherein reference to any Formula in the Clauses refers only to those Formulas that are defined within Clause 1-56. These formulae are reproduced in FIG. 6. Specifically, an oligonucleoside moiety as represented by Z in any of the following clauses can comprise a nucleic acid for inhibiting expression of HCII as defined in any of the claims hereinafter.
[0656] 1. A compound comprising the following structure:

[chemical structure]

[0657] wherein:
[0658] r and s are independently an integer selected from 1 to 16; and
[0659] Z is an oligonucleoside moiety.
[0660] 2. A compound according to Clause 1, wherein s is an integer selected from 4 to 12.
[0661] 3. A compound according to Clause 2, wherein s is 6.
[0662] 4. A compound according to any of Clauses 1 to 3, wherein r is an integer selected from 4 to 14.
[0663] 5. A compound according to Clause 4, wherein r is 6.
[0664] 6. A compound according to Clause 4, wherein r is 12.
[0665] 7. A compound according to Clause 5, which is dependent on Clause 3.
[0666] 8. A compound according to Clause 6, which is dependent on Clause 3.
[0667] 9. A compound according to any of Clauses 1 to 8, wherein Z is:

[chemical structure]

[0668] wherein;
[0669] Z₁, Z₂, Z₃, Z₄ are independently at each occurrence oxygen or sulfur; and
[0670] one the bonds between P and Z₂, and P and Z₃ is a single bond and the other bond is a double bond.
[0671] 10. A compound according to any of Clauses 1 to 9, wherein said oligonucleoside is an RNA compound capable of modulating, preferably inhibiting, expression of a target gene.
[0672] 11. A compound according to any of Clause 10, wherein said RNA compound comprises an RNA duplex comprising first and second strands, wherein the first strand is at least partially complementary to an RNA sequence of a target gene, and the second strand is at least partially complementary to said first strand, and wherein each of the first and second strands have 5′ and 3′ ends.
[0673] 12. A compound according to Clause 11, preferably also dependent on Clauses 3 and 6, wherein the RNA compound is attached at the 5′ end of its second strand to the adjacent phosphate.
[0674] 13. A compound according to Clause 11, preferably also dependent on Clauses 3 and 5, wherein the RNA compound is attached at the 3′ end of its second strand to the adjacent phosphate.
[0675] 14. A compound of Formula (II), preferably dependent on Clause 12:

[chemical structure]

[0676] 15. A compound of Formula (III), preferably dependent on Clause 13:

[chemical structure]

[0677] 16. A compound as defined in any of Clauses 1 to 15, wherein the oligonucleoside comprises an RNA duplex which further comprises one or more riboses modified at the 2′ position, preferably a plurality of riboses modified at the 2′ position.
[0678] 17. A compound according to Clause 16, wherein the modifications are chosen from 2′-O-methyl, 2′-deoxy-fluoro, and 2′-deoxy.
[0679] 18. A compound according to any of Clauses 1 to 17, wherein the oligonucleoside further comprises one or more degradation protective moieties at one or more ends.
[0680] 19. A compound according to Clause 18, wherein said one or more degradation protective moieties are not present at the end of the oligonucleoside strand that carries the linker/ligand moieties, and/or wherein said one or more degradation protective moieties is selected from phosphorothioate internucleoside linkages, phosphorodithioate internucleoside linkages and inverted abasic nucleosides, wherein said inverted abasic nucleosides are present at the distal end of the same strand to the end that carries the linker/ligand moieties.
[0681] 20. A compound according to any of Clauses 1 to 19, wherein said ligand moiety as depicted in Formula (I) in Clause 1 comprises one or more ligands.
[0682] 21. A compound according to Clause 20, wherein said ligand moiety as depicted in Formula (I) in Clause 1 comprises one or more carbohydrate ligands.
[0683] 22. A compound according to Clause 21, wherein said one or more carbohydrates can be a monosaccharide, disaccharide, trisaccharide, tetrasaccharide, oligosaccharide or polysaccharide.
[0684] 23. A compound according to Clause 22, wherein said one or more carbohydrates comprise one or more galactose moieties, one or more lactose moieties, one or more N-AcetylGalactosamine moieties, and/or one or more mannose moieties.
[0685] 24. A compound according to Clause 23, wherein said one or more carbohydrates comprise one or more N-Acetyl-Galactosamine moieties.
[0686] 25. A compound according to Clause 24, which comprises two or three N-AcetylGalactosamine moieties.
[0687] 26. A compound according to any of the preceding Clauses, wherein said one or more ligands are attached in a linear configuration, or in a branched configuration.
[0688] 27. A compound according to Clause 26, wherein said one or more ligands are attached as a biantennary or triantennary branched configuration.
[0689] 28. A compound according to Clauses 20 to 27, wherein said moiety:

[chemical structure]

[0690] as depicted in Formula (I) in Clause 1 is any of Formulae (IV), (V) or (VI), preferably Formula (IV):

[chemical structure]

[0691] wherein:
[0692] Ar is hydrogen, or a suitable hydroxy protecting group;
[0693] a is an integer of 2 or 3; and
[0694] b is an integer of 2 to 5; or

[chemical structure]

[0695] wherein:
[0696] Ar is hydrogen, or a suitable hydroxy protecting group;
[0697] a is an integer of 2 or 3; and
[0698] c and d are independently integers of 1 to 6; or

[chemical structure]

[0699] wherein:
[0700] Ar is hydrogen, or a suitable hydroxy protecting group;
[0701] a is an integer of 2 or 3; and
[0702] e is an integer of 2 to 10.
[0703] 29. A compound according to any of Clauses 1 to 28, wherein said moiety:

[chemical structure]

[0704] as depicted in Formula (I) in Clause 1 is Formula (VII):

[chemical structure]

[0705] wherein:
[0706] Ar is hydrogen;
[0707] a is an integer of 2 or 3.
[0708] 30. A compound according to Clause 28 or 29, wherein a=2.
[0709] 31. A compound according to Clause 28 or 29, wherein a=3.
[0710] 32. A compound according to Clause 28, wherein b=3.
[0711] 33. A compound of Formula (VIII):

[chemical structure]

[0712] 34. A compound of Formula (IX):

[chemical structure]

[0713] 35. A compound according to Clause 33 or 34, wherein the oligonucleoside comprises an RNA duplex which further comprises one or more riboses modified at the 2′ position, preferably a plurality of riboses modified at the 2′ position.
[0714] 36. A compound according to Clause 35, wherein the modifications are chosen from 2′-O-methyl, 2′-deoxy-fluoro, and 2′-deoxy.
[0715] 37. A compound according to any of Clauses 33 to 36, wherein the oligonucleoside further comprises one or more degradation protective moieties at one or more ends.
[0716] 38. A compound according to Clause 37, wherein said one or more degradation protective moieties are not present at the end of the oligonucleoside strand that carries the linker/ligand moieties, and/or wherein said one or more degradation protective moieties is selected from phosphorothioate internucleoside linkages, phosphorodithioate internucleoside linkages and inverted abasic nucleosides, wherein said inverted abasic nucleosides are present at the distal end of the same strand to the end that carries the linker/ligand moieties.
[0717] 39. A compound according to Clause 33, wherein the oligonucleoside comprises an RNA duplex comprising first and second strands, wherein the first strand is at least partially complementary to an RNA sequence of a target gene, and the second strand is at least partially complementary to said first strand, and wherein each of the first and second strands have 5′ and 3′ ends, and wherein said RNA duplex is attached at the 5′ end of its second strand to the adjacent phosphate.
[0718] 40. A compound according to Clause 34, wherein the oligonucleoside comprises an RNA duplex comprising first and second strands, wherein the first strand is at least partially complementary to an RNA sequence of a target gene, and the second strand is at least partially complementary to said first strand, and wherein each of the first and second strands have 5′ and 3′ ends, and wherein said RNA duplex is attached at the 3′ end of its second strand to the adjacent phosphate.
[0719] 41. A process of preparing a compound according to any of Clauses 1 to 40, which comprises reacting compounds of Formulae (X) and (XI):

[chemical structure]

[0720] wherein:
[0721] r and s are independently an integer selected from 1 to 16; and
[0722] Z is an oligonucleoside moiety;
[0723] and where appropriate carrying out deprotection of the ligand and/or annealing of a second strand for the oligonucleoside.
[0724] 42. A process according to Clause 41, to prepare a compound according to any of Clauses 6, 8 to 14, 16 to 33, and 35 to 40, wherein:
[0725] compound of Formula (X) is Formula (Xa):

[chemical structure]

[0726] and compound of Formula (XI) is Formula (XIa):

[chemical structure]

[0727] wherein the oligonucleoside comprises an RNA duplex comprising first and second strands, wherein the first strand is at least partially complementary to an RNA sequence of a target gene, and the second strand is at least partially complementary to said first strand, and wherein each of the first and second strands have 5′ and 3′ ends, and wherein said RNA duplex is attached at the 5′ end of its second strand to the adjacent phosphate.
[0728] 43. A process according to Clause 41, to prepare a compound according to any of Clauses 5, 7, 9 to 13, 15 to 32, and 34 to 40, wherein:
[0729] compound of Formula (X) is Formula (Xb):

[chemical structure]

[0730] and compound of Formula (XI) is Formula (XIa):

[chemical structure]

[0731] wherein the oligonucleoside comprises an RNA duplex comprising first and second strands, wherein the first strand is at least partially complementary to an RNA sequence of a target gene, and the second strand is at least partially complementary to said first strand, and wherein each of the first and second strands have 5′ and 3′ ends, and wherein said RNA duplex is attached at the 3′ end of its second strand to the adjacent phosphate.
[0732] 44. A process according to Clauses 42 or 43, wherein:
[0733] compound of Formula (XIa) is Formula (XIb):

[chemical structure]

[0734] 45. A compound of Formula (X):

[chemical structure]

[0735] wherein:
[0736] r is independently an integer selected from 1 to 16; and
[0737] Z is an oligonucleoside moiety.
[0738] 46. A compound of Formula (Xa):

[chemical structure]

[0739] 47. A compound of Formula (Xb):

[chemical structure]

[0740] 48. A compound of Formula (XI):

[chemical structure]

[0741] wherein;
[0742] s is independently an integer selected from 1 to 16; and
[0743] Z is an oligonucleoside moiety.
[0744] 49. A compound of Formula (XIa):

[chemical structure]

[0745] 50. A compound of Formula (XIb):

[chemical structure]

[0746] 51. Use of a compound according to any of Clauses 45 and 48 to 50, for the preparation of a compound according to any of Clauses 1 to 40.
[0747] 52. Use of a compound according to Clause 46, for the preparation of a compound according to any of Clauses 6, 8 to 14, 16 to 33, and 35 to 40.
[0748] 53. Use of a compound according to Clause 47, for the preparation of a compound according to any of Clauses 5, 7, 9 to 13, 15 to 32, and 34 to 40.
[0749] 54. A compound or composition obtained, or obtainable by a process according to any of Clauses 41 to 44.
[0750] 55. A pharmaceutical composition comprising of a compound according to any of Clauses 1 to 40, together with a pharmaceutically acceptable carrier, diluent or excipient.
[0751] 56. A compound according to any of Clauses 1 to 40, for use in therapy.

### EXAMPLES

[0752] The invention will be more fully understood by reference to the following examples. They should not, however, be construed as limiting the scope of the invention. It is understood that the examples and embodiments described herein are for illustrative purposes only and that various modifications or changes in light thereof will be suggested to persons skilled in the art and are to be included within the spirit and purview of this application and scope of the appended Clauses.

### Example 1: Synthesis of Tether 1

### General Experimental Conditions:

[0753] Thin layer chromatography (TLC) was performed on silica-coated aluminium plates with fluorescence indicator 254 nm from Macherey-Nagel. Compounds were visualized under UV light (254 nm), or after spraying with the 5% H₂SO₄ in methanol (MeOH) or ninhydrin reagent according to Stahl (from Sigma-Aldrich), followed by heating. Flash chromatography was performed with a Biotage Isolera One flash chromatography instrument equipped with a dual variable UV wavelength detector (200-400 nm) using Biotage Sfär Silica 10, 25, 50 or 100 g columns (Uppsala, Sweden).

[0754] All moisture-sensitive reactions were carried out under anhydrous conditions using dry glassware, anhydrous solvents, and argon atmosphere. All commercially available reagents were purchased from Sigma-Aldrich and solvents from Carl Roth GmbH+Co. KG. D-Galactosamine pentaacetate was purchased from AK scientific.

[0755] HPLC/ESI-MS was performed on a Dionex UltiMate 3000 RS UHPLC system and Thermo Scientific MSQ Plus Mass spectrometer using an Acquity UPLC Protein BEH C4 column from Waters (300 Å, 1.7 μm, 2.1×100 mm) at 60° C. The solvent system consisted of solvent A with H₂O containing 0.1% formic acid and solvent B with acetonitrile (ACN) containing 0.1% formic acid. A gradient from 5-100% of B over 15 min with a flow rate of 0.4 mL/min was employed. Detector and conditions: Corona ultra-charged aerosol detection (from esa). Nebulizer Temp.: 25° C. N₂ pressure: 35.1 psi. Filter: Corona.

[0756] ¹H and ¹³C NMR spectra were recorded at room temperature on a Varian spectrometer at 500 MHz (¹H NMR) and 125 MHz (¹³C NMR). Chemical shifts are given in ppm referenced to the solvent residual peak (CDCl₃—¹H NMR: δ at 7.26 ppm and ¹³C NMR δ at 77.2 ppm; DMSO-d₆—1H NMR: 8 at 2.50 ppm and ¹³C NMR δ at 39.5 ppm). Coupling constants are given in Hertz. Signal splitting patterns are described as singlet(s), doublet (d), triplet (t) or multiplet (m).

[0757] Synthesis route for the conjugate building block TriGalNAc_Tether1:

[chemical structure]

[0758] Preparation of compound 2: D-Galactosamine pentaacetate (3.00 g, 7.71 mmol, 1.0 eq.) was dissolved in anhydrous dichloromethane (DCM) (30 mL) under argon and trimethylsilyl trifluoromethanesulfonate (TMSOTf, 4.28 g, 19.27 mmol, 2.5 eq.) was added. The reaction was stirred at room temperature for 3 h. The reaction mixture was diluted with DCM (50 mL) and washed with cold saturated aq. NaHCO₃ (100 mL) and water (100 mL). The organic layer was separated, dried over Na₂SO₄ and concentrated to afford the title compound as yellow oil, which was purified by flash chromatography (gradient elution: 0-10% MeOH in DCM in 10 CV). The product was obtained as colourless oil (2.5 g, 98%, rf=0.45 (2% MeOH in DCM)).

[chemical structure]

[0759] Preparation of compound 4: Compound 2 (2.30 g, 6.98 mmol, 1.0 eq.) and azido-PEG3-OH (1.83 g, 10.5 mmol, 1.5 eq.) were dissolved in anhydrous DCM (40 mL) under argon and molecular sieves 3 Å (5 g) were added to the solution. The mixture was stirred at room temperature for 1 h. TMSOTf (0.77 g, 3.49 mmol, 0.5 eq.) was then added to the mixture and the reaction was stirred overnight. The molecular sieves were filtered, the filtrate was diluted with DCM (100 mL) and washed with cold saturated aq. NaHCO₃ (100 mL) and water (100 mL). The organic layer was separated, dried over Na₂SO₄ and the solvent was removed under reduced pressure. The crude material was purified by flash chromatography (gradient elution: 0-3% MeOH in DCM in 10 CV) to afford the title product as light yellow oil (3.10 g, 88%, rf=0.25 (2% MeOH in DCM)). MS: calculated for C₂₀H₃₂N₄O₁₁, 504.21. Found 505.4. ¹H NMR (500 MHZ, CDCl₃) δ 6.21-6.14 (m, 1H), 5.30 (dd, J=3.4, 1.1 Hz, 1H), 5.04 (dd, J=11.2, 3.4 Hz, 1H), 4.76 (d, J=8.6 Hz, 1H), 4.23-4.08 (m, 3H), 3.91-3.80 (m, 3H), 3.74-3.59 (m, 9H), 3.49-3.41 (m, 2H), 2.14 (s, 3H), 2.02 (s, 3H), 1.97 (d, J=4.2 Hz, 6H). ¹³C NMR (125 MHz, CDCl₃) δ 170.6 (C), 170.5 (C), 170.4 (C), 170.3 (C), 102.1 (CH), 71.6 (CH), 70.8 (CH), 70.6 (CH), 70.5 (CH), 70.3 (CH₂), 69.7 (CH₂), 68.5 (CH₂), 66.6 (CH₂), 61.5 (CH₂), 23.1 (CH₃), 20.7 (3×CH₃).

[chemical structure]

[0760] Preparation of compound 5: Compound 4 (1.00 g, 1.98 mmol, 1.0 eq.) was dissolved in a mixture of ethyl acetate (EtOAc) and MeOH (30 mL 1:1 v/v) and Pd/C (100 mg) was added. The reaction mixture was degassed using vacuum/argon cycles (3×) and hydrogenated under balloon pressure overnight. The reaction mixture was filtered through celite and washed with EtOAc (30 mL). The solvent was removed under reduced pressure to afford the title compound as colourless oil (0.95 g, quantitative yield, rf=0.25 (10% MeOH in DCM). The compound was used without further purification. MS: calculated for C20H34N₂On, 478.2. Found 479.4.

[chemical structure]

[0761] Preparation of compound 7: Tris{[2-(tert-butoxycarbonyl) ethoxy]methyl}-methylamine 6 (3.37 g, 6.67 mmol, 1.0 eq.) was dissolved in a mixture of DCM/water (40 mL 1:1 v/v) and Na₂CO₃ (0.18 g, 1.7 mmol, 0.25 eq.) was added while stirring vigorously. Benzyl chloroformate (2.94 mL, 20.7 mmol, 3.10 eq.) was added dropwise to the previous mixture and the reaction was stirred at room temperature for 24 h. The reaction mixture was diluted with CH₂Cl (100 mL) and washed with water (100 mL). The organic layer was separated and dried over Na₂SO₄. The solvent was removed under reduced pressure and the resulting crude material was purified by flash chromatography (gradient elution: 0-10% EtOAc in cyclohexane in 12 CV) to afford the title compound as pale yellowish oil (3.9 g, 91%, rf=0.56 (10% EtOAc in cyclohexane)). MS: calculated for C₃₃H₅₃NO₁₁, 639.3. Found 640.9. ¹H NMR (500 MHz, DMSO-d₆) δ7.38-7.26 (m, 5H), 4.97 (s, 2H), 3.54 (t, 6H), 3.50 (s, 6H), 2.38 (t, 6H), 1.39 (s, 27H). ¹³C NMR (125 MHz, DMSO-d₆) δ 170.3 (3×C), 154.5 (C), 137.1 (C), 128.2 (2×CH), 127.7 (CH), 127.6 (2×CH), 79.7 (3×C), 68.4 (3×CH₂), 66.8 (3×CH₂), 64.9 (C), 58.7 (CH₂), 35.8 (3×CH₂), 27.7 (9×CH₃).

[chemical structure]

[0762] Preparation of compound 8: Cbz-NH-tris-Boc-ester 7 (0.20 g, 0.39 mmol, 1.0 eq.) was dissolved in CH₂Cl₂ (1 mL) under argon, trifluoroacetic acid (TFA, 1 mL) was added and the reaction was stirred at room temperature for 1 h. The solvent was removed under reduced pressure, the residue was co-evaporated 3 times with toluene (5 mL) and dried under high vacuum to get the compound as its TFA salt (0.183 g, 98%). The compound was used without further purification. MS: calculated for C₂₁H₂₉NO₁₁, 471.6. Found 472.4.

[chemical structure]

[0763] Preparation of compound 9: CbzNH-tris-COOH 8 (0.72 g, 1.49 mmol, 1.0 eq.) and GalNAc-PEG3-NH₂ 5 (3.56 g, 7.44 mmol, 5.0 eq.) were dissolved in N,N-dimethylformamide (DMF) (25 mL). Then N,N,N′,N′-tetramethyl-O-(1H-benzotriazol-1-yl) uronium hexafluorophosphate (HBTU) (2.78 g, 7.44 mmol, 5.0 eq.), 1-hydroxybenzotriazole hydrate (HOBt) (1.05 g, 7.44 mmol, 5.0 eq.) and N,N-diisopropylethylamine (DIPEA) (2.07 mL, 11.9 mmol, 8.0 eq.) were added to the solution and the reaction was stirred for 72 h. The solvent was removed under reduced pressure, the residue was dissolved in DCM (100 mL) and washed with saturated aq. NaHCO₃ (100 mL). The organic layer was dried over Na₂SO₄, the solvent evaporated and the crude material was purified by flash chromatography (gradient elution: 0-5% MeOH in DCM in 14 CV). The product was obtained as pale yellowish oil (1.2 g, 43%, rf=0.20 (5% MeOH in DCM)). MS: calculated for C₈₁H₁₂₈N₇O₄₁, 1852.9. Found 1854.7. ¹H NMR (500 MHz, DMSO-d₆) δ 7.90-7.80 (m, 10H), 7.65-7.62 (m, 4H), 7.47-7.43 (m, 3H), 7.38-7.32 (m, 8H), 5.24-5.22 (m, 3H), 5.02-4.97 (m, 4H), 4.60-4.57 (m, 3H), 4.07-3.90 (m 10H), 3.67-3.36 (m, 70H), 3.23-3.07 (m, 25H), 2.18 (s, 10H), 2.00 (s, 13H), 1.89 (s, 11H), 1.80-1.78 (m, 17H), ¹³C NMR (125 MHZ, DMSO-d₆) δ 170.1 (C), 169.8 (C), 169.7 (C), 169.4 (C), 169.2 (C), 169.1 (C), 142.7 (C), 126.3 (CH), 123.9 (CH), 118.7 (CH), 109.7 (CH), 100.8 (CH), 70.5 (CH), 69.8 (CH), 69.6 (CH), 69.5 (CH), 69.3 (CH₂), 69.0 (CH₂), 68.2 (CH₂), 67.2 (CH₂), 66.7 (CH₂), 61.4 (CH₂), 22.6 (CH₂), 22.4 (3×CH₃), 20.7 (9×CH₃).

[chemical structure]

[0764] Preparation of compound 10: Triantennary GalNAc compound 9 (0.27 g, 0.14 mmol, 1.0 eq.) was dissolved in MeOH (15 mL), 3 drops of acetic acid (AcOH) and Pd/C (30 mg) was added. The reaction mixture was degassed using vacuum/argon cycles (3×) and hydrogenated under balloon pressure overnight. The completion of the reaction was followed by mass spectrometry and the resulting mixture was filtered through a thin pad of celite. The solvent was evaporated and the residue obtained was dried under high vacuum and used for the next step without further purification. The product was obtained as pale yellowish oil (0.24 g, quantitative yield). MS: calculated for C₇₃H₁₁₉N₇O₃₉, 1718.8. Found 1719.3.

[chemical structure]

[0765] Preparation of compound 11: Commercially available suberic acid bis(N-hydroxysuccinimide ester) (3.67 g, 9.9 mmol, 1.0 eq.) was dissolved in DMF (5 mL) and triethylamine (1.2 mL) was added. To this solution was added dropwise a solution of 3-azido-1-propylamine (1.0 g, 9.9 mmol, 1.0 eq.) in DMF (5 mL) The reaction was stirred at room temperature for 3 h. The reaction mixture was diluted with EtOAc (100 mL) and washed with water (50 mL). The organic layer was separated, dried over Na₂SO₄ and the solvent was removed under reduced pressure. The crude material was purified by flash chromatography (gradient elution: 0-5% MeOH in DCM in 16 CV). The product was obtained as white solid (1.54 g, 43%, rf=0.71 (5% MeOH in DCM)). MS: calculated for C₁₅H₂₃N₅O₅, 353.4. Found 354.3.

[chemical structure]

[0766] Preparation of TriGalNAc (12): Triantennary GalNAc compound 10 (0.35 g, 0.24 mmol, 1.0 eq.) and compound 11 (0.11 g, 0.31 mmol, 1.5 eq.) were dissolved in DCM (5 mL) under argon and triethylamine (0.1 mL, 0.61 mmol, 3.0 eq.) was added. The reaction was stirred at room temperature overnight. The solvent was removed under reduced pressure, the residue was dissolved in EtOAc (100 mL) and washed with water (100 mL). The organic layer was separated and dried over Na₂SO₄. The solvent was evaporated and the resulting crude material was purified by flash chromatography (elution gradient: 0-10% MeOH in DCM in 20 CV) to afford the title compound as white fluffy solid (0.27 g, 67%, rf=0.5 (10% MeOH in DCM)). MS: calculated for C₈₄H₁₃₇N₁₁O₄₁, 1957.1. Found 1959.6.

Conjugation of Tether 1 to a siRNA Strand: Monofluoro Cyclooctyne (MFCO) Conjugation at 5′- or 3′-End

[chemical structure]

[0767] General conditions for MFCO conjugation: Amine-modified single strand was dissolved at 700 OD/mL in 50 mM carbonate/bicarbonate buffer pH 9.6/dimethyl sulfoxide (DMSO) 4:6 (v/v) and to this solution was added one molar equivalent of a 35 mM solution of MFCO-C6-NHS ester (Berry&Associates, Cat. #LK 4300) in DMF. The reaction was carried out at room temperature and after 1 h another molar equivalent of the MFCO solution was added. The reaction was allowed to proceed for an additional hour and was monitored by LC/MS. At least two molar equivalent excess of the MFCO NHS ester reagent relative to the amino modified oligonucleotide were needed to achieve quantitative consumption of the starting material. The reaction mixture was diluted 15-fold with water, filtered through a 1.2 μm filter from Sartorius and then purified by reserve phase (RP HPLC) on an Äkta Pure instrument (GE Healthcare).

[0768] Purification was performed using a XBridge C18 Prep 19×50 mm column from Waters. Buffer A was 100 mM TEAAc pH 7 and buffer B contained 95% acetonitrile in buffer A. A flow rate of 10 mL/min and a temperature of 60° C. were employed. UV traces at 280 nm were recorded. A gradient of 0-100% B within 60 column volumes was employed.

[0769] Fractions containing full length conjugated oligonucleotide were pooled, precipitated in the freezer with 3 M NaOAc, pH 5.2 and 85% ethanol and the collected pellet was dissolved in water. Samples were desalted by size exclusion chromatography and concentrated using a speed-vac concentrator to yield the conjugated oligonucleotide in an isolated yield of 40-80%

[chemical structure]

[0770] General procedure for TriGalNAc conjugation: MFCO-modified single strand was dissolved at 2000 OD/mL in water and to this solution was added one equivalent solution of compound 12 (10 mM) in DMF. The reaction was carried out at room temperature and after 3 h 0.7 molar equivalent of the compound 12 solution was added. The reaction was allowed to proceed overnight and completion was monitored by LCMS. The conjugate was diluted 15-fold in water, filtered through a 1.2 μm filter from Sartorius and then purified by RP HPLC on an Äkta Pure instrument (GE Healthcare).

[0771] RP HPLC purification was performed using a XBridge C18 Prep 19×50 mm column from Waters. Buffer A was 100 mM triethylammonium acetate pH 7 and buffer B contained 95% acetonitrile in buffer A. A flow rate of 10 mL/min and a temperature of 60° C. were employed. UV traces at 280 nm were recorded. A gradient of 0-100% B within 60 column volumes was employed.

[0772] Fractions containing full-length conjugated oligonucleotide were pooled, precipitated in the freezer with 3 M NaOAc, pH 5.2 and 85% ethanol and the collected pellet was dissolved in water to give an oligonucleotide solution of about 1000 OD/mL. The O-acetates were removed by adding 20% aqueous ammonia. Quantitative removal of these protecting groups was verified by LC-MS.

[0773] The conjugates were desalted by size exclusion chromatography using Sephadex G25 Fine resin (GE Healthcare) on an Äkta Pure (GE Healthcare) instrument to yield the conjugated oligonucleotides in an isolated yield of 50-70%.

[0774] The following schemes further set out the routes of synthesis:

[chemical structure]

[chemical structure]

[chemical structure]

[chemical structure]

[chemical structure]

[chemical structure]

[chemical structure]

[chemical structure]

[chemical structure]

### Example 2: Duplex Annealing

[0775] To generate the desired siRNA duplex, the two complementary strands were annealed by combining equimolar aqueous solutions of both strands. The mixtures were placed into a water bath at 70° C. for 5 minutes and subsequently allowed to cool to ambient temperature within 2 h. The duplexes were lyophilized for 2 days and stored at −20° C.

[0776] The duplexes were analyzed by analytical SEC HPLC on Superdex™ 75 Increase 5/150 GL column 5×153-158 mm (Cytiva) on a Dionex Ultimate 3000 (Thermo Fisher Scientific) HPLC system. Mobile phase consisted of 1×PBS containing 10% acetonitrile. An isocratic gradient was run in 10 min at a flow rate of 1.5 mL/min at room temperature. UV traces at 260 and 280 nm were recorded. Water (LC-MS grade) was purchased from Sigma-Aldrich and Phosphate-buffered saline (PBS; 10×, pH 7.4) was purchased from GIBCO (Thermo Fisher Scientific).

### Example 3: Synthesis of Tether 2

### General Experimental Conditions:

[0777] Thin layer chromatography (TLC) was performed on silica-coated aluminium plates with fluorescence indicator 254 nm from Macherey-Nagel. Compounds were visualized under UV light (254 nm), or after spraying with the 5% H₂SO₄ in methanol (MeOH) or ninhydrin reagent according to Stahl (from Sigma-Aldrich), followed by heating. Flash chromatography was performed with a Biotage Isolera One flash chromatography instrument equipped with a dual variable UV wavelength detector (200-400 nm) using Biotage Sfär Silica 10, 25, 50 or 100 g columns (Uppsala, Sweden).

[0778] All moisture-sensitive reactions were carried out under anhydrous conditions using dry glassware, anhydrous solvents, and argon atmosphere. All commercially available reagents were purchased from Sigma-Aldrich and solvents from Carl Roth GmbH+Co. KG. D-Galactosamine pentaacetate was purchased from AK scientific.

[0779] HPLC/ESI-MS was performed on a Dionex UltiMate 3000 RS UHPLC system and Thermo Scientific MSQ Plus Mass spectrometer using an Acquity UPLC Protein BEH C4 column from Waters (300 Å, 1.7 μm, 2.1×100 mm) at 60° C. The solvent system consisted of solvent A with H₂O containing 0.1% formic acid and solvent B with acetonitrile (ACN) containing 0.1% formic acid. A gradient from 5-100% of B over 15 min with a flow rate of 0.4 mL/min was employed. Detector and conditions: Corona ultra-charged aerosol detection (from esa). Nebulizer Temp.: 25° C. N₂ pressure: 35.1 psi. Filter: Corona.

[0780] ¹H and ¹³C NMR spectra were recorded at room temperature on a Varian spectrometer at 500 MHz (′H NMR) and 125 MHz (¹³C NMR). Chemical shifts are given in ppm referenced to the solvent residual peak (CDCl₃—¹H NMR: & at 7.26 ppm and ¹³C NMR δ at 77.2 ppm; DMSO-d₆—¹H NMR: 8 at 2.50 ppm and ¹³C NMR δ at 39.5 ppm). Coupling constants are given in Hertz. Signal splitting patterns are described as singlet(s), doublet (d), triplet (t) or multiplet (m).

### Synthesis Route for the Conjugate Building Block TriGalNAc_Tether2:

[chemical structure]

[0781] Preparation of compound 2: D-Galactosamine pentaacetate (3.00 g, 7.71 mmol, 1.0 eq.) was dissolved in anhydrous dichloromethane (DCM) (30 mL) under argon and trimethylsilyl trifluoromethanesulfonate (TMSOTf, 4.28 g, 19.27 mmol, 2.5 eq.) was added. The reaction was stirred at room temperature for 3 h. The reaction mixture was diluted with DCM (50 mL) and washed with cold saturated aq. NaHCO₃ (100 mL) and water (100 mL). The organic layer was separated, dried over Na₂SO₄, and concentrated to afford the title compound as yellow oil, which was purified by flash chromatography (gradient elution: 0-10% MeOH in DCM in 10 CV). The product was obtained as colourless oil (2.5 g, 98%, rf=0.45 (2% MeOH in DCM))

[chemical structure]

[0782] Preparation of compound 4: Compound 2 (2.30 g, 6.98 mmol, 1.0 eq) and azido-PEG3-OH (1.83 g, 10.5 mmol, 1.5 eq.) were dissolved in anhydrous DCM (40 mL) under argon and molecular sieves 3 Å (5 g) were added to the solution. The mixture was stirred at room temperature for 1 h. TMSOTf (0.77 g, 3.49 mmol, 0.5 eq.) was then added to the mixture and the reaction was stirred overnight. The molecular sieves were filtered, the filtrate was diluted with DCM (100 mL) and washed with cold saturated aq. NaHCO₃ (100 mL) and water (100 mL). The organic layer was separated, dried over Na₂SO₄ and the solvent was removed under reduced pressure. The crude material was purified by flash chromatography (gradient elution: 0-3% MeOH in DCM in 10 CV) to afford the title product as light-yellow oil (3.10 g, 88%, rf=0.25 (2% MeOH in DCM)) MS: calculated for C20H32N₄On, 504.21. Found 505.4. ¹H NMR (500 MHz, CDCl₃) δ 6.21-6.14 (m, 1H), 5.30 (dd, J=3.4, 1.1 Hz, 1H), 5.04 (dd, J=11.2, 3.4 Hz, 1H), 4.76 (d, J=8.6 Hz, 1H), 4.23-4.08 (m, 3H), 3.91-3.80 (m, 3H), 3.74-3.59 (m, 9H), 3.49-3.41 (m, 2H), 2.14 (s, 3H), 2.02 (s, 3H), 1.97 (d, J=4.2 Hz, 6H). ¹³C NMR (125 MHZ, CDCl₃) δ 170.6 (C), 170.5 (C), 170.4 (C), 170.3 (C), 102.1 (CH), 71.6 (CH), 70.8 (CH), 70.6 (CH), 70.5 (CH), 70.3 (CH₂), 69.7 (CH₂), 68.5 (CH₂), 66.6 (CH₂), 61.5 (CH₂), 23.1 (CH₃), 20.7 (3×CH₃).

[chemical structure]

[0783] Preparation of compound 5: Compound 4 (1.00 g, 1.98 mmol, 1.0 eq.) was dissolved in a mixture of ethyl acetate (EtOAc) and MeOH (30 mL 1:1 v/v) and Pd/C (100 mg) was added. The reaction mixture was degassed using vacuum/argon cycles (3×) and hydrogenated under balloon pressure overnight. The reaction mixture was filtered through celite and washed with EtOAc (30 mL). The solvent was removed under reduced pressure to afford the title compound as colourless oil (0.95 g, quantitative yield, rf=0.25 (10% MeOH in DCM)). The compound was used without further purification. MS: calculated for C₂₀H₃₄N₂O₁₁, 478.2. Found 479.4.

[chemical structure]

[0784] Preparation of compound 7: Tris{[2-(tert-butoxycarbonyl) ethoxy]methyl}-methylamine 6 (3.37 g, 6.67 mmol, 1.0 eq.) was dissolved in a mixture of DCM/water (40 mL 1:1 v/v) and Na₂CO₃ (0.18 g, 1.7 mmol, 0.25 eq.) was added while stirring vigorously. Benzyl chloroformate (2.94 mL, 20.7 mmol, 3.10 eq.) was added dropwise to the previous mixture and the reaction was stirred at room temperature for 24 h. The reaction mixture was diluted with CH₂Cl₂ (100 mL) and washed with water (100 mL). The organic layer was separated and dried over Na₂SO₄. The solvent was removed under reduced pressure and the resulting crude material was purified by flash chromatography (gradient elution: 0-10% EtOAc in cyclohexane in 12 CV) to afford the title compound as pale yellowish oil (3.9 g, 91%, rf=0.56 (10% EtOAc in cyclohexane)). MS: calculated for C₃₃H₅₃NO₁₁, 639.3. Found 640.9. ¹H NMR (500 MHZ, DMSO-d₆) δ 7.38-7.26 (m, 5H), 4.97 (s, 2H), 3.54 (t, 6H), 3.50 (s, 6H), 2.38 (t, 6H), 1.39 (s, 27H). ¹³C NMR (125 MHz, DMSO-d₆) δ 170.3 (3×C), 154.5 (C), 137.1 (C), 128.2 (2×CH), 127.7 (CH), 127.6 (2×CH), 79.7 (3×C), 68.4 (3×CH₂), 66.8 (3×CH₂), 64.9 (C), 58.7 (CH₂), 35.8 (3×CH₂), 27.7 (9×CH₃).

[chemical structure]

[0785] Preparation of compound 8: Cbz-NH-tris-Boc-ester 7 (0.20 g, 0.39 mmol, 1.0 eq.) was dissolved in CH₂Cl₂ (1 mL) under argon, trifluoroacetic acid (TFA, 1 mL) was added and the reaction was stirred at room temperature for 1 h. The solvent was removed under reduced pressure, the residue was co-evaporated 3 times with toluene (5 mL) and dried under high vacuum to get the compound as its TFA salt (0.183 g, 98%). The compound was used without further purification. MS: calculated for C₂₁H₂₉NO₁₁, 471.6. Found 472.4.

[chemical structure]

[0786] Preparation of compound 9: CbzNH-tris-COOH 8 (0.72 g, 1.49 mmol, 1.0 eq.) and GalNAc-PEG3-NH₂ 5 (3.56 g, 7.44 mmol, 5.0 eq.) were dissolved in N,N-dimethylformamide (DMF) (25 mL). Then N,N,N′,N′-tetramethyl-O-(1H-benzotriazol-1-yl) uronium hexafluorophosphate (HBTU) (2.78 g, 7.44 mmol, 5.0 eq.), 1-hydroxybenzotriazole hydrate (HOBt) (1.05 g, 7.44 mmol, 5.0 eq.) and N,N-diisopropylethylamine (DIPEA) (2.07 mL, 11.9 mmol, 8.0 eq.) were added to the solution and the reaction was stirred for 72 b. The solvent was removed under reduced pressure, the residue was dissolved in DCM (100 mL) and washed with saturated aq. NaHCO₃ (100 mL). The organic layer was dried over Na₂SO₄, the solvent evaporated and the crude material was purified by flash chromatography (gradient elution: 0-5% MeOH in DCM in 14 CV). The product was obtained as pale yellowish oil (1.2 g, 43%, rf=0.20 (5% MeOH in DCM)). MS: calculated for C₂₁H₁₂₅N₇O₄₁, 1852.9. Found 1854.7. ¹H NMR (500 MHz, DMSO-d₆) δ 7.90-7.80 (m, 10H), 7.65-7.62 (m, 4H), 7.47-7.43 (m, 3H), 7.38-7.32 (m, 8H), 5.24-5.22 (m, 3H), 5.02-4.97 (m, 4H), 4.60-4.57 (m, 3H), 4.07-3.90 (m 10H), 3.67-3.36 (m, 70H), 3.23-3.07 (m, 25H), 2.18 (s, 10H), 2.00 (s, 13H), 1.89 (s, 11H), 1.80-1.78 (m, 17H). ¹³C NMR (125 MHZ, DMSO-d₆) δ 170.1 (C), 169.8 (C), 169.7 (C), 169.4 (C), 169.2 (C), 169.1 (C), 142.7 (C), 126.3 (CH), 123.9 (CH), 118.7 (CH), 109.7 (CH), 100.8 (CH), 70.5 (CH), 69.8 (CH), 69.6 (CH), 69.5 (CH), 69.3 (CH₂), 69.0 (CH₂), 68.2 (CH₂), 67.2 (CH₂), 66.7 (CH₂), 61.4 (CH₂), 22.6 (CH₂), 22.4 (3×CH₃), 20.7 (9×CH₃).

[chemical structure]

[0787] Preparation of compound 10: Triantennary GalNAc compound 9 (0.27 g, 0.14 mmol, 1.0 eq.) was dissolved in MeOH (15 mL), 3 drops of acetic acid (AcOH) and Pd/C (30 mg) was added. The reaction mixture was degassed using vacuum/argon cycles (3×) and hydrogenated under balloon pressure overnight. The completion of the reaction was followed by mass spectrometry and the resulting mixture was filtered through a thin pad of celite. The solvent was evaporated, and the residue obtained was dried under high vacuum and used for the next step without further purification. The product was obtained as pale yellowish oil (0.24 g, quantitative yield). MS: calculated for C₇₃H₁₁₉N₇O₃₉, 1718.8. Found 1719.3.

[chemical structure]

[0788] Preparation of compound 14: Triantennary GalNAc compound 10 (0.45 g, 0.26 mmol, 1.0 eq.), HBTU (0.19 g, 0.53 mmol, 2.0 eq.) and DIPEA (0.23 mL, 1.3 mmol, 5.0 eq.) were dissolved in DCM (10 mL) under argon. To this mixture, it was added dropwise a solution of compound 13 (0.14 g, 0.53 mmol, 2.0 eq.) in DCM (5 mL). The reaction was stirred at room temperature overnight. The solvent was removed, and the residue was dissolved in EtOAc (50 mL), washed with water (50 mL) and dried over Na₂SO₄. The solvent was evaporated, and the crude material was purified by flash chromatography (gradient elution: 0-5% MeOH in DCM in 20 CV). The product was obtained as white fluffy solid (0.25 g, 48%, rf=0.4 (10% MeOH in DCM)). MS: calculated for C88H137N7O42, 1965.1. Found 1965.6.

[chemical structure]

[0789] Preparation of TriGalNAc (15): Triantennary GalNAc compound 14 (0.31 g, 0.15 mmol, 1.0 eq.) was dissolved in EtOAc (15 mL) and Pd/C (40 mg) was added. The reaction mixture was degassed by using vacuum/argon cycles (3×) and hydrogenated under balloon pressure overnight. The completion of the reaction was monitored by mass spectrometry and the resulting mixture was filtered through a thin pad of celite. The solvent was removed under reduced pressure and the resulting residue was dried under high vacuum overnight. The residue was used for conjugations to oligonucleosides without further purification (0.28 g, quantitative yield). MS: calculated for C₈₁H₁₃₁N₇O₄₂, 1874.9. Found 1875.3.

Conjugation of Tether 2 to a siRNA Strand: TriGalNAc Tether 2 (GalNAc-T2) Conjugation at 5′-End or 3′-End

[chemical structure]

[0790] Preparation of TriGalNAc tether 2 NHS ester: To a solution of carboxylic acid tether 2 (compound 15, 227 mg, 121 μmol) in DMF (2.1 mL), N-hydroxysuccinimide (NHS) (15.3 mg, 133 μmol) and N,N′-diisopropylcarbodiimide (DIC) (19.7 μL, 127 μmol) were added. The solution was stirred at room temperature for 18 h and used without purification for the subsequent conjugation reactions.

[0791] General procedure for triGalNAc tether 2 conjugation: Amine-modified single strand was dissolved at 700 OD/mL in 50 mM carbonate/bicarbonate buffer pH 9.6/DMSO 4:6 (v/v) and to this solution was added one molar equivalent of Tether 2 NHS ester (57 mM) solution in DMF. The reaction was carried out at room temperature and after 1 h another molar equivalent of the NHS ester solution was added. The reaction was allowed to proceed for one more hour and reaction progress was monitored by LCMS. At least two molar equivalent excess of the NHS ester reagent relative to the amino modified oligonucleoside were needed to achieve quantitative consumption of the starting material. The reaction mixture was diluted 15-fold with water, filtered once through 1.2 μm filter from Sartorius and then purified by reserve phase (RP HPLC) on an Äkta Pure (GE Healthcare) instrument.

[0792] The purification was performed using a XBridge C18 Prep 19×50 mm column from Waters. Buffer A was 100 mM TEAA pH 7 and buffer B contained 95% acetonitrile in buffer A. A flow rate of 10 mL/min and a temperature of 60° C. were employed. UV traces at 280 nm were recorded. A gradient of 0-100% B within 60 column volumes was employed.

[0793] Fractions containing full-length conjugated oligonucleosides were pooled together, precipitated in the freezer with 3 M NaOAc, pH 5.2 and 85% ethanol and then dissolved at 1000 OD/mL in water. The O-acetates were removed with 20% ammonium hydroxide in water until completion (monitored by LC-MS).

[0794] The conjugates were desalted by size exclusion chromatography using Sephadex G25 Fine resin (GE Healthcare) on an Äkta Pure (GE Healthcare) instrument to yield the conjugated oligonucleotides in an isolated yield of 60-80%.

[0795] The conjugates were characterized by HPLC-MS analysis with a 2.1×50 mm XBridge C18 column (Waters) on a Dionex Ultimate 3000 (Thermo Fisher Scientific) HPLC system equipped with a Compact ESI-Qq-TOF mass spectrometer (Bruker Daltonics). Buffer A was 16.3 mM triethylamine, 100 mM HFIP in 1% MeOH in H2O and buffer B contained 95% MeOH in buffer A. A flow rate of 250 μL/min and a temperature of 60° C. were employed. UV traces at 260 and 280 nm were recorded. A gradient of 1-100% B within 31 min was employed.

[0796] The following schemes further set out the routes of synthesis:

[chemical structure]

[chemical structure]

[chemical structure]

[chemical structure]

### Example 4: Duplex Annealing

[0797] To generate the desired siRNA duplex, the two complementary strands were annealed by combining equimolar aqueous solutions of both strands. The mixtures were placed into a water bath at 70° C. for 5 minutes and subsequently allowed to cool to ambient temperature within 2 h. The duplexes were lyophilized for 2 days and stored at −20° C.

[0798] The duplexes were analyzed by analytical SEC HPLC on Superdex™ 75 Increase 5/150 GL column 5×153-158 mm (Cytiva) on a Dionex Ultimate 3000 (Thermo Fisher Scientific) HPLC system. Mobile phase consisted of 1×PBS containing 10% acetonitrile. An isocratic gradient was run in 10 min at a flow rate of 1.5 mL/min at room temperature. UV traces at 260 and 280 nm were recorded. Water (LC-MS grade) was purchased from Sigma-Aldrich and Phosphate-buffered saline (PBS, 10×, pH 7.4) was purchased from GIBCO (Thermo Fisher Scientific).

### Example 5: Alternative Synthesis Route for the Conjugate Building Block TriGalNAc_Tether2

[chemical structure]

[chemical structure]

[chemical structure]

[chemical structure]

Conjugation of Tether 2 to a siRNA strand: TriGalNAc Tether 2 (GalNAc-T2) Conjugation at 5′-end or 3′-end

### Conjugation Conditions

[chemical structure]

[0799] Pre-activation: To a solution of compound 15 (16 μmol, 4 eq.) in DMF (160 μL) was added TFA-O-PFP (15 μl, 21 eq.) followed by DIPEA (23 μl, 32 eq.) at 25° C. The tube was shaken for 2 h at 25° C. The reaction was quenched with H₂O (10 μL).

[0800] Coupling: The resulting mixture was diluted with DMF (400 μl), followed by addition of oligo-amine solution (4.0 μmol in 10×PBS, pH 7.4, 500 μL; final oligo concentration in organic and aqueous solution: 4 μmol/ml=4 mM). The tube was shaken at 25° C. for 16 h and the reaction was analysed by LCMS. The resulting mixture was treated with 28% NH₄OH (4.5 ml) and shaken for 2 h at 25° C. The mixture was analysed by LCMS, concentrated, and purified by IP-RP HPLC to produce the oligonucleotides conjugated to tether 2 GalNAc.

[chemical structure]

### Example 6: Solid Phase Synthesis Method: Scale ≤1 μMol

[0801] Syntheses of siRNA sense and antisense strands were performed on a MerMade192X synthesiser with commercially available solid supports made of controlled pore glass with universal linker (Universal CPG, with a loading of 40 μmol/g; LGC Biosearch or Glen Research).

[0802] RNA phosphoramidites were purchased from ChemGenes or Hongene.

[0803] The 2′-O-Methyl phosphoramidites used were the following: 5′-(4,4′-dimethoxytrityl)-N-benzoyl-adenosine 2′-O-methyl-3′-[(2-cyanoethyl)-(N,N-diisopropyl)]-phosphoramidite, 5′-(4,4′-dimethoxytrityl)-N-acetyl-cytidine 2′-O-methyl-3′-[(2-cyanoethyl)-(N,N-diisopropyl)]-phosphoramidite, 5′-(4,4′-dimethoxytrityl)-N-isobutyryl-guanosine 2′-O-methyl-3′-[(2-cyanoethyl)-(N,N-diisopropyl)]-phosphoramidite, 5′-(4,4′-dimethoxytrityl)-uridine 2′-O-methyl-3′-[(2-cyanoethyl)-(N,N-diisopropyl)]-phosphoramidite.

[0804] The 2′-F phosphoramidites used were the following: 5′-dimethoxytrityl-N-benzoyl-deoxyadenosine 2′-fluoro-3′-[(2-cyanoethyl)-(N,N-diisopropyl)]-phosphoramidite, 5′-dimethoxytrityl-N-acetyl-deoxycytidine 2′-fluoro-3′-[(2-cyanoethyl)-(N,N-diisopropyl)]-phosphoramidite, 5′-dimethoxytrityl-N-isobutyryl-deoxyguanosine 2′-fluoro-3′-[(2-cyanoethyl)-(N,N-diisopropyl)]-phosphoramidite and 5′-dimethoxytrityl-deoxyuridine 2′-fluoro-3′-[(2-cyanoethyl)-(N,N-diisopropyl)]-phosphoramidite.

[0805] All phosphoramidites were dissolved in anhydrous acetonitrile (Honeywell Research Chemicals) at a concentration of 0.05M, except 2′-O-methyl-uridine phosphoramidite which was dissolved in DMF/MeCN (1:4, v/v). Iodine at 0.02M in acetonitrile/Pyridine/H2O (DNAchem) was used as oxidizing reagent. Thiolation for phosphorothioate linkages was performed with 0.2 M PADS (TCI) in acetonitrile/pyridine 1:1 v/v. 5-Ethyl thiotetrazole (ETT), 0.25M mM in acetonitrile was used as activator solution.

[0806] Inverted abasic phosphoramidite, 3-O-Dimethoxytrityl-2-deoxyribose-5˜ [(2-cyanoethyl)-(N,N-diisopropyl)]-phosphoramidite were purchased from Chemgenes (ANP-1422) or Hongene (OP-040).

[0807] At each cycle, the DMT was removed by deblock solution, 3% TCA in DCM (DNAchem).

[0808] The coupling time was 180 seconds. The oxidizer contact time was set to 80 seconds and thiolation time was 2*100 seconds.

[0809] At the end of the synthesis, the oligonucleotides were cleaved from the solid support using a NH₄OH: EtOH solution 4:1 (v/v) for 20 hours at 45° C. (TCI). The solid support was then filtered off, the filter was thoroughly washed with H₂O and the volume of the combined solution was reduced by evaporation under reduced pressure.

[0810] Oligonucleotide were treated to form the sodium salt by ultracentrifugation using Amicon Ultra-2 Centrifugal Filter Unit; PBS buffer (10×, Teknova, pH 7.4, Sterile) or by EtOH precipitation from IM sodium acetate.

[0811] The single strands identity were assessed by MS ESI- and then, were annealed in water to form the final duplex siRNA and duplex purity were assessed by size exclusion chromatography.

### Example 7: Solid Phase Synthesis Method: Scale ≥5 μmol

[0812] Syntheses of siRNA sense and antisense strands were performed on a MerMade12 synthesiser with commercially available solid supports made of controlled pore glass with universal linker (Universal CPG, with a loading of 40 μmol/g; LGC Biosearch or Glen Research) at 5 μmol scale. Sense strand destined to 3′ conjugation were synthesised at 12 μmol on 3′-PT-Amino-Modifier C6 CPG 500 Å solid support with a loading of 86 μmol/g (LGC).

[0813] RNA phosphoramidites were purchased from ChemGenes or Hongene.

[0814] The 2′-O-Methyl phosphoramidites used were the following: 5′-(4,4′-dimethoxytrityl)-N-benzoyl-adenosine 2′-O-methyl-3′-[(2-cyanoethyl)-(N,N-diisopropyl)]-phosphoramidite, 5′-(4,4′-dimethoxytrityl)-N-acetyl-cytidine 2′-O-methyl-3′-[(2-cyanoethyl)-(N,N-diisopropyl)]-phosphoramidite, 5′-(4,4′-dimethoxytrityl)-N-isobutyryl-guanosine 2′-O-methyl-3′-[(2-cyanoethyl)-(N,N-diisopropyl)]-phosphoramidite, 5′-(4,4′-dimethoxytrityl)-uridine 2′-O-methyl-3′-[(2-cyanoethyl)-(N,N-diisopropyl)]-phosphoramidite.

[0815] The 2′-F phosphoramidites used were the following: 5′-dimethoxytrityl-N-benzoyl-deoxyadenosine 2′-fluoro-3′-[(2-cyanoethyl)-(N,N-diisopropyl)]-phosphoramidite, 5′-dimethoxytrityl-N-acetyl-deoxycytidine 2′-fluoro-3′-[(2-cyanoethyl)-(N,N-diisopropyl)]-phosphoramidite, 5′-dimethoxytrityl-N-isobutyryl-deoxyguanosine 2′-fluoro-3′-[(2-cyanoethyl)-(N,N-diisopropyl)]-phosphoramidite and 5′-dimethoxytrityl-deoxyuridine 2′-fluoro-3′-[(2-cyanoethyl)-(N,N-diisopropyl)]-phosphoramidite.

[0816] Inverted abasic phosphoramidite, 3-O-Dimethoxytrityl-2-deoxyribose-5-[(2-cyanoethyl)-(N,N-diisopropyl)]-phosphoramidite were purchased from Chemgenes (ANP-1422) or Hongene (OP-040).

[0817] All phosphoramidites were dissolved in anhydrous acetonitrile (Honeywell Research Chemicals) at a concentration of 0.05M, except 2′-O-methyl-uridine phosphoramidite which was dissolved in DMF/MeCN (1:4, v/v). Iodine at 0.02M in acetonitrile/Pyridine/H2O (DNAchem) was used as oxidizing reagent. Thiolation for phosphorothioate linkages was performed with 0.2 M PADS (TCI) in acetonitrile/pyridine 1:1 v/v. 5-Ethyl thiotetrazole (ETT), 0.25M mM in acetonitrile was used as activator solution.

[0818] At each cycle, the DMT was removed by deblock solution, 3% TCA in DCM (DNAchem).

[0819] For strands synthesised on universal CPG the coupling was performed with 8 eq. of amidite for 130 seconds. The oxidation time was 47 seconds, the thiolation time was 210 seconds.

[0820] For strands synthesised on 3′-PT-Amino-Modifier C6 CPG the coupling was performed with 8 eq. of amidite for 2*150 seconds. The oxidation time was 47 seconds, the thiolation time was 250 seconds.

[0821] At the end of the synthesis, the oligonucleotides were cleaved from the solid support using a NH₄OH: EtOH solution 4:1 (v/v) for 20 hours at 45° C. (TCI). The solid support was then filtered off, the filter was thoroughly washed with H₂O and the volume of the combined solution was reduced by evaporation under reduced pressure.

[0822] Oligonucleotide were treated to form the sodium salt by EtOH precipitation from IM sodium acetate.

[0823] The single strand oligonucleotides were purified by IP-RP HPLC on Xbridge BEH C18 5 μm, 130 Å, 19×150 mm (Waters) column with an increasing gradient of B in A. Mobile phase A: 240 mM HFIP, 7 mM TEA and 5% methanol in water; mobile phase B: 240 mM HFIP, 7 mM TEA in methanol.

[0824] The single strands purity and identity were assessed by UPLC/MS ESI-on Xbridge BEH C18 2.5 μm, 3×50 mm (Waters) column with an increasing gradient of B in A. Mobile phase A: 100 mM HFIP, 5 mM TEA in water; mobile phase B: 20% mobile phase A: 80% Acetonitrile (v/v).

[0825] Sense strand were conjugated as per protocols provided in any of Examples 1, 3 or 5.

[0826] Sense and Antisense strands were then annealed in water to form the final duplex siRNA and duplex purity were assessed by size exclusion chromatography.

### Example 8: Nucleic Acid Sequences

[0827] siRNA oligonucleosides according to the present invention target HCII. The full DNA sequence of the HCII target is as follows (SEQ ID NO: 1):

TTGCGCTTCTAGAATGCTTCCCTCTCAATGAGAACAGTAGCTCCACGTGGCTGGGAAGTTCAAAGTGG
TTTTGACACAGAAAAGAGGAAGTAAGTGGACTCTATCTTTGATTTGGGATCCTACTCCTGACCCTGTG
AACTTCTTGGCTCCCTCTTGAGGACGTTGGCTTGAAAGTGGCTCTGTGGGTTCTCCCTGCTCTCTGACTT
CTCCGAGCCTGCTGGCCACTGTCTTGGCTGAGACTGCTCTAGTCTCCAGAAAGGAGATCTGCTCACTCC
TAAGAAGTATCAAGGTCAGGCCAGGTGTGGTGGCTCACGCCTGTAATCCCAGCACTTTGGGAGGCCAA
GACAGGCAGATCAGGAGGTCAGGAGATCGAGATCAGCCTGGCTAACACGGTAAAACCCCATCTCTAC
TAAAAATACAAAAAATTAGCCAGGCGTGGTGGCACACACCTGTAGTCCCAGGTACTCGGGAGGCTGA
AGCAGGAGAATCGCTTGAAACCAGGAGGCCGAGGTTGCAGTGAGCCAAGATTGCGCCACTGCACTGC
AGCCTGGGCGACAGAGCGAGACGCCATTTCAAAAAAAAAAAAAAATCAAGGTCAGGGGGGAAGTGG
GAAGACTGAAATAGATAAAGGATTCTAAAGAGATATAACAGTCAAATGCGACACATGAAACCCTGAC
CAGATAAAAATTAAAAACCCATAAAATACATGTTTGAAGTCATAGAGTAATCTGACTTGGACTAGACA
TGTGATATATGTGAGGCTTGTGATCTTCCCAGGAGTGATGGTAGCACAGCACAGGGCAGAGACCCGTC
CATGGAAGAAACACTGGTGCTAGTGCCCAGGGCAGAAGTGAGTGATGTCTTTAAGTGGATATGGAAA
AATATTAACTATTCTACCTAGGTTGTGGGTGTATGGATATTTAGTATTCAATTATTCCAATTTCTCTGTG
TATGTATACATATTTTTTTTAGAGACAGGGTCTCACTCTGTCGACCACACTGGAGTAGGGGGTACAATC
ATAGCTCACTGTACATACTCAAGTGATCCTTCTGCCTCAGCCTCCTGAGCAGATGGGACTACAGGTGT
GCAGCATCATGGCCCAGTTTTTTTTTTTTTGGTAGAGATGGGTTTTGCTAGCCGGGAGCAGTGGCTCAT
GCCTGTAATCCTAGCACTTTGGGAGGCTGAGGCGGGCAGATCATCTGAGGTCAGGAGTTCAAGACCAG
CCTGGGCAACATGGTAAAACCCTGTCTCTACTAAAAACACAAAAATTAGCCAGGCATGATGGCAGGC
GCCTGTAATCCCAGCTACTTGGGAGGCTGAGGCAGGAGAATCGCTTGAACCCAGGAGGCAGAGGTTG
CAGCAAGCTAAGATTGAGCCACTGCACTCCAGCCTGGGCAACAGAGCAAAAACTCCGTCTCAAAAAA
AAAAAAAAAAAAAGAGAGAGAGAGAGATCGGTTTTGCTATGTTGCCCAAGCTGGACACGGACACACA
CACACACACACACACACACACACACACACACACACACACACACACAAGCTGGACACAGAGACACACA
CAGTGACAGGGCAAAGGTTCCAAAATTTTAAACCTGGTAAATCTGGGTACGGGTATACAGGAGTTGTT
CTACTACACTATTCTTTCAACTTTTTTGAAAGTTTGAAGTTATTTCAAAAGAAAAAGTTTTCCAAACTTT
AGTGATCCTCCTGCCTCAGCCTCCCAAAGTGCTGGGATGATAGGCATGAGCCACCGTGCCTGACCCCT
CTGTATATTTTTAGAATTTCATGTTAAAAGATGGAAAAGTCTGGATGAGGTAGTTCACGCCTGTCTTCC
CAGCTCTTTGGGAGGCCAAGGTGGGAAGACTGCTTGAAGCCAGACGTTCAAGACCAACTTGGCCAAC
ATAGTGAGACCCCGCTTTTTTCTAACTAAAAAAATTTTTTTCCAAGTTGGAAAAAATATCTAGCCATAA
GACAAACCTTGAAACTGCAAAAGAACAATGGAGTATGTGTGACAGGAGGTACTGCTCTACAGTGGGG
TTAAAGCCATACACAAGCTGTGGTGGCTCACGCCTGTAATCCCAGCACTTTGGGAGGCCGATGCGGGC
GGATCATGAGGTTAGGAGTTCAAGACCAGCCTGGCCAGCATGGTGAAACCCGTCTCTACTAAAAATAC
AAAACATTAGCCAGACGTGGTGGTGGGCACCTGTAGTCCCAGCTACTAGGGAGGCTGAGGCAGGAGA
ATGGCGTGAACCCAGGAGGCGGAGCTTGCAGTGAGCTGAGATTGCGCCACTGCACTCCAGCCTGGGC
GACAGAGCGAGACTCTGTCTCAAAAAAAAAAAAGCCATACACAAGCTGTTACCACTAAATGGGAAAA
TGACTGAAAAATGTCAATGTCAAGAGGGACTGAAATCAAATTTTTCCAATAGTGGGTTACATGATCAG
AAATCCAAATAGACAGGAAATATGTTGGCTTTATTTATTTATTTATTTATTTATTTATTTATTTAGACAG
AGTCTCACTCTGTCACCCAGGCTGGAGTACAGTGGCATGAACTCGGCTCACTGCAACCTTCACCTCCC
AGGTTCAAGCGATTGTCCTGCCTCAGCCTCCCGAGTAGCTGGGACTACAGATGTGTGCCACCACACCC
AGCTAATTTTTGTATTTTTAGTAGGGACGGGGTTTTACCATGTTGGTCAGGCTGGTCTTGAACTCCTGA
CCTCAAGTGATCCACCCGCCTTGGCCTCTCAAAGTGCTGGGATTACAGGTGTGAGCCACCACACCTGG
CCGGTACTGGCTTTAAAAATAACAAAAGTAATACATACACATAGAAAAAGGTCAAACAAAGAAGTAC
ATAGAATGAAAAATGAATGCTGTGTCCCCTCCCAGACCATTTCTGTGAATAAATATGTAATACCATGA
AATGATGAGGACTAACATTTTCTGAATGCCAGGCACCACTCTATGTGCTTTCCACACATTCATTAACCT
CATTTAATTTTCTCATTTAATTAATGAGATAAATTAATGTATCTCATTTAATTTTCACAACAACCTCATG
CAGTAGGTGTAACTGTCACCCTCATTTCAGAGAGCAGAATACTGAGAGCTGGAGGCCAAGGGGCAAT
TTCAGCCAGGGTGGCTGGTGACGCCTCGGTGAAACCAAGAGCGAACAGTGAGAGCAGCGGCCACCTG
CTGGTCTGCAGGGATGGTGTCCTGGGCAGAAAGAATAGCAAGTGCCAGGGCTGTGCTGGGGCCGGGC
TTTGCATGTGTGAGAACAAGACAGAGAATGAGGGAGGTGGGCCCACGAGGAGTGTGGGCACAGACAG
CAGCCTCTGCCTGTGGTGCCACGCTGAAGACTCAGTATTGTATGTGACAGATGAAGGCTCTAAGAAGA
CAGCTCTGACAAAAGCTAGAGTGCAAAATCAGACTCAGACACAACCACCGGTCTGTGTCCTGAACAC
AATGGACCTTTACACTCTGGAATTTCTCAAACGGAGCAATGCACAGACACCCCCATGGGCCCCTTGCA
CACCCGCAGATTCTCCTAGGAGTCACATTCTCTCTTCAGATAGACTCTGGGTGCCGACACTCCCAAACA
TGCTCTTGAGGAGCAGTCTCTGTGATAAGCTGATCTTCCAGACAATCCAGAATATTCTTAAAACTTTTT
AGATCATAAAATTTAAAACACAAATTAAAAAACAAATTATCATAAGGCCGGGCACAGTGACTCATGC
CTGTAATCCCAGCACTTTGCAAGGCTGAAGCAGGAGGATCACTTGAGCCCAAGAGTTCAAGACCAGCC
TAGGCAACATAGTGAGACCCTGTCTCTACAAAAAAGTCAAAAGTTAGCTAGACATGGTGGTGTGCACC
TGTATTCCCAGCTACTTGCAGGGCTGAGGTGAGGAGGATTGCTTCAGCTCGGGAGGTTGAGGCTGCAG
TGAGCCAAGATCACGCCACTGCACTCCAGCCTGGGTAACAGAGTGAGACCCTGTCTCAAAAAACACAT
AGGGCCAGGCGTGGTGGCTCACGCATGTAATCCCAGCACTTTGGGAGGCCGAGACGGGAGGATCACT
TCACTCCAGGAGTTCAACACCAGCCTGGCCAACATAGTGAAACCCCGTCTCTACTAAAAATACAAAAA
ATTAGTTGGACATGGTGGTGTGCGCCTGTAATCTCAGCCACTCAGGAGGCTGAGGCAGGAGAACGCTT
GAACTTGGGAGACAGAGGTTGCAGTGAGCTGAGATCGCACCACTGCACTCCAGCATGGGCAGCAGCG
CGAAACTCTGTCTCAAAACAAACAAACAAACAAACAAACACCCATAAACACAAAATGTATCACAGCC
TCAGAGATCCCCACGAATGCCTAAGTGGCCCTGAATTTGGGAGGCACTGCTCAGTAATAGTCCTATCT
GTCCCACAACAGACAGGAGTGCTGGGCTGCACCTACTGGCAACAAACACAGCAACCCTTGACTGAAG
AAAGGTCCATGCCACAATCCCCTTATTCTGTAAGCCACTAATTTTGTCCTCTCTCCTCCACCTTTCACTG
AGGAACGAGCTCTTGGAAGGACAGGGACACCCGCCTAGTAGCTGAGCCAGCCACATCAGTCCTGGAG
AGCAGGTGGAGGGCAGATGCTGTGATCATCCCAGAAGAGAGGACACAGTTGGAGGCAGATGCATGGT
CTCTACTTTCAGCTACCCTCAATGCAGCCTGGTCCCCAGAGGCCTGAAGAGCGCCTTGTTTATGTGGTG
ACCTCAAGAGGGGCTGCTCCTGCACCAAGGCTATGTGTGCATGCTAACACAGTAACCGTCATATACTC
AAAGTGTCAGCTCTAAGAACTGGAGATGAGGAGCTGCAAGCCACTCTACAGTTATCAAAGGCACAGC
TGAGGGGGTTTGTGCTGACCAAGCTGGTTGCCTGGTGTTTGGATTGGGACTTATTTACTTTGGAAAATA
TGCAGCAACAGCCCAGCACCAAAGTTCACATCAAAATCCCACTGATGACCTTGGCTGCTTTCATCTCT
GAAGCGCCACTTCTCAGAAACACAGAGGTAAGTTGGGTTTCTAATGTTTCTGCTGATTATAAATTATTT
TTGGTGTTTACGGATAGGCAACTGGTTCATTTTTCTAGCAAACTAAGAATTCAGAAGCTTTCTACACTG
TTTTAGAAGTGGGAAATGGTTTCATTTTTCAGTGTGCCTATTATAAAATTGTGTCAGTTCCATTGTTGG
GAGAGTTGACAAACTTAGAATAGGAGCTGTGGAATAGATGAAAATATTGTACTTATATTAAATTAATC
GAATTGGATAACTGTCCTGTGATTATGTATGAGAATATCCTTGCTCTTGGGTATTTTCCCTGAAGTATT
AGTATTAAAGGTTAGAGGGGCCGGGTGCAGTGGCTCACGCCTGTAATCCCAACACTTTGGGAGGCCGA
GGCGGGTGGATCACGAGGTCAGGAGTTCAAGACCAGCCTGACCAACATGGTGAAGCCAAGTCTCTAC
TAAAAATACAAAAATTAGCTGGGCGTGGTGGCACGCGCCTGTAATCCCAGCTACTCAGGAGGCTGAG
GCAGGAGAATCGCTTAAACCCGGGAGGCAGAGGTTGCAGTGAGCGGAGATCGTGCCACTGCACTCCA
GCCTGGACAACAGAGTTAGACTCCGTCAAAAAAAAAAAAAAAAAGAAGAAAAAAGAAAAAATGTTA
GAGGAACAAGATATAGGAGACCTACTCTCAAATGGTCTAGAAGAAAAAATGTGTATGTGCATGCCTG
TGAGAACACACACGTACGTACACACACACACAGATAATGACAGGGCAAAGGTTCCAAAATTTTAAAC
CTGGTAAATCTCGGTACGGGTATACAGGAGTTGTTCTACTACACTATTCTTTCAACATTTTTGGAAGTT
TGAACTTACTTCAAAATAAAAAGTTTTCCAAACTTTAGGCAGTTACTTCTCTCCCATTCTGCCTGCTCT
GTTGGGCCTGGAGACCATACACCAGGAGGGATGACGGTTTATCAAGTGTTATGCTCTGATGCGTGACT
GAAAAGGCCAACCCAGCTCTGGCAATTAGCAAGAAAGCACAATATGAAGTTCCCAGGAAAAAAAAAA
AGCAAAACAAACTTTTGAATGATTTATCTTTAAAATATATTGTTTCTCTTCAAACAGTAATCTGGATTT
AATCACAACCTAGTGATAGTTTTTAAACGTCTTCTACAATGTTTGTTATACTAAATAGCAAAACATCAG
GAAGATTTACCTTCAGATCTTTAATTTCAATCCATAAAAGATATCAGAGATATTTTCTCCTTCCTCTGG
TAAGGGAATGACGAAAACTATTTTTGGCTTTTTATCAGATAATGTGGGAACAGGGTATAAGAAGTTTC
CAAATATAACTTCTGAATACCGGGATAAAACATGCATGTCTTTACTCTGCCACTCTATCTGGCCTCAGA
TACGTTTTCCTGAATGCTTATTTATTCAAGTTGGTTTTTGTTTTGTTCTTTAACCTTATTTTTATCTGAGA
AGAAAACATTTTCCCCCTTTGTTCCTTCTTCTTTTGGCTTTCTTTTTTAAAATAGAGATGAGGTCTTGCT
ATGTTGCTCCAGCTGGTCTTGAACTCCTGGGCTCAAGCGATCCTCCTGCCTTGGCCTCCCAAGATGCTA
AGATTACAGGTGTGAGCCCCTATGCCTGGTCTTCTTCTTCTTGATCTTAGCCAAAAGGCCAAGAAGTGA
TAAGAGGAGGACACTTGAAGTGTAGTTGGGCAAGGAGCCTTCTACCAGCTGCTTACTTTCTTTGTTCCT
GACTTTTAAAAGTGTGTTGCTATTGATACACAGTCTCCTGATATGTAAAATGCTGGGAGGATGAAGCT
AAGTTACTCAAAGTGCCATTCAGAAACTGGGCCCAGTTCTATTTGCAGCTACATACATTAGAAATCAT
TTCTAGAGGCTGAGCATGGTAACTCATACCTGTAATTCCAGCACTTTGGGAGGCCAAGGCAGGAGAAT
TGCCTGAGCTCAGGAGTTTGAGACCTGTCTGGGCAACATGGTAAAACCCCATCTTTACCAAAAACACA
AAAAATTAACTGGGTTTGGTGGCACACACCTGTGGTCCCAGCTACTTCAAAAGGCTGAGGTGGGAGGG
TCTCTTGAGCCTGAGAGGAACAGGTGGCAGTGAACCAATATTGTGCCACTGCACTCCAGCCTGGGTGA
CAGAGTGAGACCCCGCCGTCTCAAAATAAAAATAAAAAGAAATCGTTTCTAGAAACTGTTTTCCCGTG
TGTAAACTAGTGGCACTGCAGCCTGAGGCAGGTGCTGAGATGGGGACCTGGAAAAGGCAACAGGCAT
TTTGAGTCAGAAACAATGTGACTTTCCTGCTCCAAAATGTGCAATTCAAAAGTCTTTCTTAGTTGTGAC
TAAAACAAACTTTGAACTTACTATTTCAACAGTATTATAAGGGGAAGACCCAAGGAATGGGACTGGCA
CTGGGAAAACAGCTAGGAAGCTGCTCTGCACGGCCAGGGAGTCTGGAAGCATCCTGGTACTCCAGAG
CGAACAAGGCTGAGCGCTTGATGTGGGGCTTAGAGGCTTAACCAACTTGGTTCGAATCTAGCCACTGC
CACTTATTAGTGACAGTGACGAAAGGCTCAGTCTCCTGATATATAAAATGTTGGGAGGATGAAACTAA
GTTACACGAAGTGCCTTATACAGCGTGTCAGGCATCCAACAGAGGCCATTATCAACATTAACCACACT
GACAGCATTTCAAGCAGAGTATCCGAACAGTTACCCCATCTTCAGGCCTACTGAGTTCAAATATTTGCT
TAACAAGAGCAGCCAGTAACTCTTACCTGGCCTCAACTGGCAGCAGATATTCTGGGCCTCAAATATCT
ATCTAATAGGAAATGGTCACAGACACAAAATAAGCTTAACAAAAGGCAGTTTTTTTTTGTTTTTTTTTT
GTTTTCTGTTTTTTGAGATAAGGACTCACTCTATCCCCCAGGTTGGAGTGCAGTAGTGGCGTGATCACG
GCTCACTGCAGACTCAAGTGATCCTCCTACTTCAGCCTCTCAAGTAGATGGGACCACAGGCGTGTGCC
ATCACACCAGGCTAATTATTTTTCTTTTCTTTTTTTTTTTTTTGAGACGGAGTTTCGCTCTTTTTGCCCAG
GCTGGAGTGCAATGGTGCGATCTTGGCTCACCACAACCTCTGCCTCCTGAATTCAAACGAATCTCCTGC
CTCAGCCTCCTAAGTATCTGGGATTACAGGCATGCGCCACCACGCCGGCTAATTTTTTTGTATTTTTTG
TAGAGACAGGGTTTCTCCATGTTGGCCAGGCTGGTCTCGAACTCCCGACCTCAGATGATCCGCCCACC
TCGGCCTCCCAAAGTGCTGGGATTACTGACCTGAGCCACCGCACCCAGCCTATTTATTTAATTTTTCAC
AGAGATGAGGTCTTGCTATGTTGCCCACACTGGTCTTGAGCTCCTGGGCTCAAGTGATCTTCCTGCCTT
GGTCTCCCAGTGTTGGGATTATAGGCGTAAGCCACAGCGCCTGGCCGGCAGTTCTTTCTGGGGTGATT
AGAAGTTGGGACCATGTATTACCTGTCTGAGTCAGCATTATAAACACCTATGGTCACTGTCCTGGCAA
AACATGGAATCATCAAAGCTCATCTAACCAGAGTGCAGTTAATAACCAGGAAGTAAGCAAGAGAAAG
ACAAAGGATTTGGCAGTCAAAACAGATTTGACAGGCCAAGTCAGATCCTCCTCTGAACGAGTCAGAG
GAACAAATAAAGACAGGATTGCCATAATGCCTCTGTGCTAAAAGCTTATCTTGTTTACTTAAATAAAG
GGAGTGCCCCTCAGGTCTTGAGTAAGAGCTTGCTGACATCACCCTCACACAGACTTTATCTCTTGTTTC
TAACCCTGTGTTAGAAGCAGTAACACAGAAGATTTAGTTGCTCCTGACAGCAGTGGGAGCTATTGTCT
AAGAGATACAAAGGAGAAAAAAGTATACCTGCAGCAAGTGATATCACCTCTGGGGCTGCCACCACAT
CACCTCACTACGCCCTGAGGGGGTCTCAGCACTAGACAAGTTCCAAATCTTTTGCAAATTAAACAACC
CCAGGTCAGGCGTGGTGGCTTATGCCTGTAATCCCAGCACTTTGGGGGGCTGAGGTGGGTGGATCACC
TGAGGTCAGGAGTTTGAGACCAGCCTGGCCAACAGAGCAAAACCCCATCTCTACTAAACAAAATACA
AAAATTAACCAGGCGTAGTGGTGTGCACCTGTAGTCCCAGCTACTTGGGAGGCTGAGGCAAGAGAATT
GCTTGAGTCCAGGAGGCCGAAGTTGCAGTAAGCCGAGATCGCGCCACTGCACTCCAGCCTGGGTGAC
AGAGTGAGACTCCATTTCAAAAAATAAAAACAACAAAAGCCAATTACAACAACAACAACAAAAAAAC
AACGAATTAAACAACCCCAAAGATTGCACAAATTTCAAGTATCTTTAGAATATGTTTTCAGAAAGCCT
GGCCCATGGACATTTTTCAACAGCATCTCCATTGCAAAGGTGGAATGGTGTGAGTCACACAGGCATGG
CTGAGTCCCACTAATGCACATCCCTTCTAGGTACTCTCCAATCACCAGCCCCAGGTGCCCACTCAAGCC
CAGCTCTTAGTGAGGTTTCCCTGACTCTCTGGGCACTTCCACTCCTACCACACAGGGTAGAGCCACACC
CCTTTCCGTACCCCCATGTGCTCTGGCAGCATTATTTTGAGAGCCTTCGCTTTACTGCACGTCTGTCCCA
TCTGTCCCCTGACTGGTCCATGAGCCCCTGGTGGGAACTTTGTCTCTGGTAACTAAACACTGTCTGGAG
GTGGTGGACAAGGTGTCTGGAGAAAAACAAACTCCTCCCTGGGATGCCTGAGCTCCCAGGATTCTAGA
AGGTTAGTTTTGCAAACCTTTAAAGAAGGGATTTTCATCAAGGGGCCCACAGATCCTTCATTGAGGTTT
ATGAGTCCCACATCAAAGGTTGGGTGTCTATCTACATCAGATTCTCTTAAAGTCCATGATCCTAAAACA
GTTAAGAACTAATGCTGTGAGGGCCTCTTCCTGGGTCAAAGCCACAGGGAACCTGCCATGTGGATGCT
GCAGCGGGGTGTGGATCAGCCAGGCCGCCTTTCACTGTGTTCTGTTTTCCCTCCCAGCTTTAGCTCCGC
CAAAATGAAACACTCATTAAACGCACTTCTCATTTTCCTCATCATAACATCTGCGTGGGGTGGGAGCA
AAGGCCCGCTGGATCAGCTAGAGAAAGGAGGGGAAACTGCTCAGTCTGCAGATCCCCAGTGGGAGCA
GTTAAATAACAAAAACCTGAGCATGCCTCTTCTCCCTGCCGACTTCCACAAGGAAAACACCGTCACCA
ACGACTGGATTCCAGAGGGGGAGGAGGACGACGACTATCTGGACCTGGAGAAGATATTCAGTGAAGA
CGACGACTACATCGACATCGTCGACAGTCTGTCAGTTTCCCCGACAGACTCTGATGTGAGTGCTGGGA
ACATCCTCCAGCTTTTTCATGGCAAGAGCCGGATCCAGCGTCTTAACATCCTCAACGCCAAGTTCGCTT
TCAACCTCTACCGAGTGCTGAAAGACCAGGTCAACACTTTCGATAACATCTTCATAGCACCCGTTGGC
ATTTCTACTGCGATGGGTATGATTTCCTTAGGTCTGAAGGGAGAGACCCATGAACAAGTGCACTCGAT
TTTGCATTTTAAAGACTTTGTTAATGCCAGCAGCAAGTATGAAATCACGACCATTCATAATCTCTTCCG
TAAGCTGACTCATCGCCTCTTCAGGAGGAATTTTGGGTACACACTGCGGTCAGTCAATGACCTTTATAT
CCAGAAGCAGTTTCCAATCCTGCTTGACTTCAAAACTAAAGTAAGAGAGTATTACTTTGCTGAGGCCC
AGATAGCTGACTTCTCAGACCCTGCCTTCATATCAAAAACCAACAACCACATCATGAAGCTCACCAAG
GGCCTCATAAAAGATGCTCTGGAGAATATAGACCCTGCTACCCAGATGATGATTCTCAACTGCATCTA
CTTCAAAGGTAAGAGGCACCTTTACAGTTCTCACAGCAAACCCACAACATACTATTTTTGTATGTGGGT
AGATTGAATGCCAAGAACTGTACTGTAGCTATAATTTATCCAGGAAAACTAGACACAAGATTGACTCT
GGAACGGGGACAGGGAAGGCCAAGCTGAAGTGACAGTAGCATCTGACACTTACTGAGCCCTAACTCT
GTGCTTTAACACAGCCTTGTGAGGTCATCACTGTTATTAGCATCCCCATTTTACAGAGGAAGCCACCAA
CACATGAAGTAAAAGGATGGGCTGGGCGCGGTGGCTCACGCCTGTAATCCCAGCACTTTGGGAGGCC
GAGGCAGGCAGATCACTTGAGGTCAGGAGTTCGAGATCAGCCTGACCAACAGACCAACATGGTGAAA
ACCTGGCTCTACTAAAAATACAAAAATTAGCTGGGCCTGGCGGTGGGTGCCTGTACTCCCAGCTACTT
GGGAGGCTGAGGCAGGAGAATCACTTGAACCTGGAAGGCAGAGATTGCAGTGAGCCGAGACTGTGCC
ACTGCACTCTAGCCTGGACGACAGAGTGAGACTCCATCTCAAAAAAAAAAAAAAAAGAAGTAAAACG
ATGCTCCAAGGGCACCCAGTTATTAAGGGGCAGAGCCAAAGCTGAACCCAGGGAGGCCAACCCTAGC
AATCTGTTAAATTGGAAGAAATAATACAAAAACTGTTTTAGCATTTGGCCAGCCTGGATTTGAGTTTTC
TCTTTTCCTTTCCCAATTATCAATAAGCAGGAATATAGACAAAAGGCTAAAGAAATGCACCTGTGAAC
TATTCAGCTTGAGCAGCTGACATTGACACCTACAAGTGCTTTTCAGGATACTTTTGAACTACTGGGCAG
GTGGGATGGAGAAATAAATTACTATTTCCCCAGCAACTGTTCTGGGCTGAGCACAAGGGCACTTTTTA
AGGAGGTCACCCCACACCCATCACACACACATAGGACCCCTGGAATCCTAGGAATAAATAAGCATGG
ATTTGTAAAATCCAAACCTCTCTTTTCAAATATCCTCACCTGGACCAGACCAGAAGAAACCTCTACTTT
ACTCTCTAAGCTGAGAGTGTGGAAGGGGAAACACGAGGAATGGTTCGGCTTCAGGACTAATTGCGGT
GACACACAACCACTTCTCTTTGCCACCAAGGACTACCAGGTACCTGCAAAGGGCAGTACTTGGAGGCC
AGTGCTTTCTGCTAGTTAGCTCCCGTGGTTTTATAGCAGCCCAGGCGAAGGAAGGAGACCCCCCCCAG
CTCCTGGCTTCTGTTCAGGGAAAGGGGGCCAGAGCCCCTCCTGATCTGTCCACACACCTGCTCTGTGCC
TTGGCTGAGGCCCCTGCAGCTCTACAAGGCAGGCATTCTGCTGGATAGGCCAAGCAGGGTCACTCTGA
CACCCAGGTTTCCACCCCAAGGCATGGCACAATGCTGGCCTCCTGTGGGTGGAATCAAAGGCTGAGTT
CTAACAGGCTTGCGGCAGACACACACACAGAGACCACATGTACATGATGAACACACATATCCTTTTCA
TTACAGGTTATTAGTACAAGTTTTGGAATTGAGCAAACAAGAGTCTAAGCGCTGGTTTCACCACTTCTC
GTTTGTGTGACCTCAGACAAGTCATTCAACATCTCTATGACTCAGTTTCCTTATCTTTATCACAGAGAT
GACACCCACTCTGACAGGGCCGAGGGAAGAACCATAAGCGATGGCAATGCAACAGAGTGGCACATGA
CAAGAGCTCAGCGAATTTGAGGGAATGAAACTGTAGATTACAATACTAGTACAATATGATAAACATAT
GATATTGTTAGTGACATTTATTTTACTTCTACTAGCAAATAACCTATGTTTAGGACTGACTTTAGAACA
GGCTGGCAGAAGCATTTTTGGCAGCATCAAAGTCCTCCAACCTACTGGTCTGTTGGAGCCCCCCAAGT
ACACCAAAGAGCCTCTGCATTAGCCCTGGCTGAGGGTTCAGGGACAGGCAGAGAAGTACAGCAGTGA
GCCATCCCTGCCTGCATGGAGGTGGAGAAATGATCAGGCATGGTCAGTTGACAATCTCCTAAACACAG
TAACCCGTGTCATACCACAGTGTAAACACACGTGCAAATGCTTCTGCTTCCTTTCCCCATCATGAGAAT
AGTCACTCAATGCCGGGCATCACAAGGGATCAAATGCTAGGAGTACCCAATCATTCATGGATGCTTCT
CAAAGGGGACGAGTGTCTAGAAGTGTAATTTTAATTTCACTTAATTTCATATGGAATCATCTCCATTAC
TAATTTTGTTCTAATTTTAATGTGATAATCACTTTGTAAAGCACAATAAACAGAGGCAGGCTCTCATGA
GGAAGTCAGAAGGAAAGAATCCCAAGAGACATGGGACAGCTCCATCCAAACTGAAAGGGCCGTGATT
CCCAAAAGAGCAATTTTGTCCCCAAGGTCTGAAGACACTTTTGGTTGTCACAACCTGGGGGGTTGGAG
TAAGCATTACTGGTATCTAGAAGGGGGAGGCTGGGGATGTTGCTAAACACCCTACCATGCACAGGGC
AGCCCACATTGCCACAAACTATTATGTGGCCCAAATGTCAAAAATGCTGAGGTTGAGAAACCCTGGGT
GAGGCAGACTCAGGGAGAAGGGAATCGAGCTTCACTCACAGGCAGGCAGGAGCTGTCTGGTACTTCA
ACCTCCAAGACACCTCCTGCTCATCTCATCCTGGCTGCTCTACCCACCAGCTAGAAACCTTGAACAAGT
TACTTCACTTCTTTGTGCCTCTGTTTCCTCATATGTAAAAGAGGGATAACAAAACGCACACAACTTGCA
TGTTGCTAGGAGCAGAAATGAGATAATACAGGAAAGGTGCTGAGAAGAATGCCCGGCACATGGCCAG
TTCTCAACTACTAGTCACCCATTACTATTAGTTACTCACATCTTAGAGCTAACATAGACATGGGCTTAT
TCCTGGATACACAGCACTGTCCCCATATCTACAGTGGTGATCCTAAGGGCAACATGGCATCACCCAAA
TGTCTTGTTAGTCACTACAGAATCACAGTGTGAGGGATGAAGGCCATCAAGACAGAGCTGAGGCTGGC
AGGGTGGCTCATGCCTATAATCCCAGTGCTTTGGAAGGCTGAGGCAGGAGGATTGCTTGAGGCCAAGG
GTTTGAGACCAGCCTAGGTAACATAGCAAGACCCCATCTACAATTAAAAAAAAAAAAAAAAAGACAG
AAAGAAAAAATAGCCAGGCGTGGCATGTGCTTGTAGTCCAAGCTACTGGGGAGGGAGGCTGAGGCAG
GAGGATTCCTTGAGCCTGGGAGTGTGAGGCTGCAGTGAGCTATGATGGCATCGCCGCACTCCAGCCTG
CATGACACAGTGAGACCTGGTCTCAAAAACCAAATAATAATAACAGTAATAAAAGCTGGAAAGAGCT
CAAAGTTACTCATTTGACAGATGTGACAGATGAAGAAATAGAAGCGAGTTAGGTGCCTTACCATGGTC
AAACAACTAGTTCGTATCAGACCCTACTCCAGAAACTATTCCAGTCCGGGTAACCTCTCGTTAACCTCT
CTTGTTAGAAATGCAAATTTCTGCCCAAATCAGGCCTCAGGAATCAAGAGACTGTGGGGTCGGCTCTG
CAGGCTATCTGAATGAGGCCTCCAGGGAAATCAGATTCACTCTCAAGGGTGAGACGATTTCCCTAAAG
GAACCTTCTCATAACAGCCTCTTCCTGTGGCCTTTACAGGATCCTGGGTGAATAAATTCCCAGTGGAAA
TGACACACAACCACAACTTCCGGCTGAATGAGAGAGAGGTAGTTAAGGTTTCCATGATGCAGACCAA
GGGGAACTTCCTCGCAGCAAATGACCAGGAGCTGGACTGCGACATCCTCCAGCTGGAATACGTGGGG
GGCATCAGCATGCTAATTGTGGTCCCACACAAGATGTCTGGGATGAAGACCCTCGAAGCGCAACTGAC
ACCCCGGGTGGTGGAGAGATGGCAAAAAAGCATGACAAACAGGTATTTCACACTGTGTGTTTGTTCTT
TTGAGCTCCCAGATGCTGGGGGTGTCTGGGAATACTGGAAAATGGATCATTTTTTTAAAAAGGGAGAA
TTATGTACAAGTACCCAAGAACTTCCATACAGGGCCACTCTGTTAATTCAGCCCCAATTTGTTGCTTGA
GATAAGAGATGATTAGAGAGCATTCATAAGGGACACATCTGCCCTCTAGGGGCCAGTTTCAGAAGTTA
GAGGCAGATGACTTAGAGACAGCTTGGTGCTTGCTTTGTGGCTTCGAGTCCCAGCTTCATCATCCCTAA
AATGGGTATAATTCCATTACTTCCCCGGGTCACTTGAGAAAATAACAGAATCAGCGATGCTGAGCGCC
CCTCCCAGTACTTGGAACCTAGGAGGCACTCAAAAAAAGATTGGCTCAACTCTTCCCTGCCCAGGAAA
TTCCAAGGTCCTCTTAGCCTACCGAGGACACATCATTCATGATTTCCTCTATTATTATTCGTTACTTTGT
AGTTAAAACTGCAGGTGTTAAGTACTTATTGAGATTATTATTGGGTCATGGCAGAAAGAATGGAGAGG
TCTTATTTCTGTCTTACTGGATACTGGCTAGGCCCATATGAAGAAGTGATTCTGGTTTGAACCTCCTTA
TAGGACAAGAATACAAACATATGCAACCAAACTGAGAAAAGTAGGCTCTCAGAGGAAGGTATTTGCC
CGGGTAGCCAGTCATCATGCTCTGTGAATTTTTCCTTAACAACGTCCCTTCTGTACCTGCCTCCTTCCAT
TCCTCCCTGCAGCCCGGCAGCTCTTGAGAAAGGGACTGCATCTTTTTTTTTTTTTTTTTTTTGAGACAGG
GTCTTGTTCTGTCACCCAGGCTGGAGTGCAGTGGCATCATCATGGCTCACTGCAGCCTCAACCTCCTGA
ACTTAAGTGATCCTCTCACCTCAGCCTCCTGAATAGTTGAGACTACAGGCGTGCACCTTCATGCCCAGC
TAATTAAACTTTTTTTGGTAGAGATGAGGTCTCGCTGTGTTGCCCAGGCTGGTCTTGAACTCCTGGCCT
CAAGCAGTCCTCCTGCCTTGGCCTTCCAAAGTGCTGGGATTAACAGGCGTGAGCCGCTGTGCCTGGCC
CATTTGACTTTTAATTGAGATCTTACTTGGTGCAAGGTATGAGCTAGGTAAAAGAGTGAAGAAGATCA
AGCCTTCCTGCCCATCCAGCTGGGATTGCACCTTAAATCTCTTTATCCCCTGCAAAGTGCCAGACTAAC
TCCACAGGCACTACTGTTGCTATCCGCCCCCTTAGGGATTGAGTAAGTTGAGGCAAAGATTGAGAATA
TTCAGCATTGTCTAGTATATACAGGAAAGGTTCTTTTTAAAAGTACACTACCAGATATTCGACTCCTTA
ATTACAAAAAAAAAACCAAATGCCTAAAATTGGGAAACCAAACCAGAGAATTATTTTAGATGCCTTTT
TAAACCATAAACCAGGAAAAGTTCTGCTGCTAACCTTGAAGATAGGAAACGAACCATACAGTCTCAA
GGAAATAATCATGCAACAGAAAACACACCTCAGTTTTCAGTAGCGGAATTACAAAGGAGTGTGCTTCC
TAAAATCCTCAACTGACAGTCCCGGAATATAAATTTTAATAAGTGCTATATCAATTCTGTGATAAATAT
AACCCGTGGCCCTTTAAAGGGAAAATCATGATTCTTTTGTAACTTGTGGTTCAATAAAACTGGGCCCCC
CTTTCCTTTTCTGTCTAGAACTCGAGAAGTGCTTCTGCCGAAATTCAAGCTGGAGAAGAACTACAATCT
AGTGGAGTCCCTGAAGTTGATGGGGATCAGGATGCTGTTTGACAAAAATGGCAACATGGCAGGCATCT
CAGACCAAAGGATCGCCATCGACCTGGTAACCACTCCCTTGTCCACCCCCGACCCGTCCCCAGGGTCT
GCCTCAGCACAGCCCCACCTCCACTTGCCCTTCCTACCCACCCCCCAATCTCATGTCCCAGCTTGGGGT
GCTGAGTCTGCTCTTCGGCCTGGGTGGGATACACAGAATGCCTAGTTTCATGGATGCCAGCTGGAGAG
CACGGCACCTGGCAGACACTTACTGGGCAGGGGGGATCCCAAGAGCAGCCATGGGGTGAGCCCCACT
CCCGCTGACACCAGAGACAGGGGAGACATGTGCTGCGGTCTGGGAAATAGCTACCCCCAGCCAAATC
ATGAAAGAGCCATTAAACACCGCACTATACACATACTTAACTTAAACCAATCGGGCGCTCAGCAAAA
GAGAGAGAACACCAGTCCAAACAGTGCAGCAGACCCAGTTCCCCATCCCGGAGAAGTGCGCAGCAGT
GTGGGGAGCTGGAGCTGGGGTGGCTGTCCTGCACCAGCCCCCACGACCCTCAGACCACAGGCACTGCC
AAGAGGGAACATGAACCTAGCCGGCCTCTAAGTGCAACGGCTGCCCCTGACAGGTGGTGACAGATAT
TTTCAAGAGTGACTCTGACCAGCTGTGATTTCCACCTTACATGTTGTCTTTGGATCCTTTCCCTGAATGA
TATGAGATTGTGCTGGGAACTCTAGCCCTCTGTGTGCTGACCTCCAGAATCTGACAACTTTCCTTTCCA
AACAGTTCAAGCACCAAGGCACGATCACAGTGAACGAGGAAGGCACCCAAGCCACCACTGTGACCAC
GGTGGGGTTCATGCCGCTGTCCACCCAAGTCCGCTTCACTGTCGACCGCCCCTTTCTTTTCCTCATCTAC
GAGCATCGCACCAGCTGCCTGCTCTTCATGGGAAGAGTGGCCAACCCCAGCAGGTCCTAGAGGTGGA
GGTCTAGGTGTCTGAAGTGCCTTGGGGGCACCCTCATTTTGTTTCCATTCCAACAACGAGAACAGAGA
TGTTCTGGCATCATTTACGTAGTTTACGCTACCAATCTGAATTCGAGGCCCATATGAGAGGAGCTTAGA
AACGACCAAGAAGAGAGGCTTGTTGGAATCAATTCTGCACAATAGCCCATGCTGTAAGCTCATAGAA
GTCACTGTAACTGTAGTGTGTCTGCTGTTACCTAGAGGGTCTCACCTCCCCACTCTTCACAGCAAACCT
GAGCAGCGCGTCCTAAGCACCTCCCGCTCCGGTGACCCCATCCTTGCACACCTGACTCTGTCACTCAA
GCCTTTCTCCACCAGGCCCCTCATCTGAATACCAAGCACAGAAATGAGTGGTGTGACTAATTCCTTACC
TCTCCCAAGGAGGGTACACAACTAGCACCATTCTTGATGTCCAGGGAAGAAGCCACCTCAAGACATAT
GAGGGGTGCCCTGGGCTAATGTTAGGGCTTAATTTTCTCAAAGCCTGACCTTTCAAATCCATGATGAAT
GCCATCAGTCCCTCCTGCTGTTGCCTCCCTGTGACCTGGAGGACAGTGTGTGCCATGTCTCCCATACTA
GAGATAAATAAATGTAGCCACATTTACTGTGTATCTGTTATAATTCTCTATTTTTTGAAGCTCAAATAT
CAAAAGCCAAATCCAAATTCCTGGATAACTCCAGGTATGATAAAGGCTGAGAGGAAGTCACTTGAGC
ACCACAATGTGCCACAGCAGGGCATGTTCTCAGGACAGGACAGGTGTGTGCTGAATCCTGGGGAGGG
TCTGTGCAGTACCCCAGAACTGTGGGGTGCTAAGTGGCACACAAGCCCCAGGGCTCCCACAGTCTATG
CCAGGCTGCTGCAGCTTTCATCCCTCATACCTGGTCCTGCAGTGGGTCTGGTTTGACAGAGCAGATGAC
ACCTGAGGAATATGTTTCTGGATCCTTCAATCCCTGGGTAAGACAAGTGAAATCCACAGAGGCTGTTC
AGCACGCAAGAGTGCCAGTGCTCTTTCAGTGAGGGGATGACTGACGGTCACAGGTGCTGTGTGTGCAG
GTGTCTAACTGTAACCCCCACAGCCTGGCAGATGAGGAAGACAAGGGTTGGAAGAGTTCTGAAACCT
GTCCAAGATGCTGAAGTAGTGGGGCTGGGTTCAAGTGCAGGTTGGCTGGACTCCAGGGACCACACAA
GGAGTCCTGTCACAGGCTTCTGACCCCATGAGACCAATACCAGTAAGAAGAGTGGTAAAAGGGAGTA
GGGACGGAAGGGGAACGTCACTGCCCTTTGTAGGCATGCCTGTGGGTTATCTCACAGAGTCTCCTTAC
CCTCAATCCCTAGGGGGCTGGCACTGTTACCCCTCCTTTTTACAGCTGCAGAAGCAATTTCAGCTCACA
GAAGGGAAGGCCTCTGCCTGAGGCCTGAATCCACACCCAGGCAGGGGGACCCTGCAGCCCTGCTTTCC
CCTGCTCCCTTCCTGACTTCCCACACTGGGCTCTGCCTCCTTACTCTGCTGAGAGCAGATGGTGCAGGG
GCTGGATGAATTGCCCCAAGCCATCCTCTCGGCTTCCTGGTGAACCCTGATGCTGCGGATGGCCCACTC
CTTCAATTCATTCTCCAATCTGCTTCACCCCTCTTCTTTTCTGTCATTCTCCAAACTGCTTCACCACTCTT
CTTTTCTGTCATTCTCCAACCTGCTTCACCACTCTTCTTTTCTGGTGCCTGTCCTATATTTCTCATCTTGC
TGCAGCTTCCTTTTGGCTCTTCTCATTTCTAAATGTAATAATCTCAAAAAACCCTTTTAGTCCTTTGCCA
TGTCTGTCCCATACCCAGAAAGGCAGTGGTCACTTCTGCTCACCCAGCGCCCTCTCTGCTACAGCCGGT
GTGGAGTCCTCCACACTCTTGAGCATCCAGACACCCCCGTTTCAATGCCTTTTGTTCATGTACACCCAC
TCAGAATCTCTCAGATCCCCTCTTACAGAAACTAGCCCATCTGTTACTCAAAGCAGGAGAGTACTCATT
CAGAACACAGGCTCTGAGCCAGGCTGCCTGGTTTGAATCCTGGCTCTGCCATCTAGTAGCTATGAAAC
TCTAGTAGCAGGTTCTGTGCCTCAGTATCCTCATCTGTAAAATGGGGAGACCAGCAGCACTTACCTTG
AGGGATTGCTGTGAGGATTAATCAAATTAATGTCTAGAAAGCATTTATTTATTTATTTATTTATTCATTT
ATTTTATTTTTTTGAGACGGAGTCTCGCTCTGTTGCCCAGGCTGGAGTGCAATGGCACAATCCTGGCTC
ACTGCAACCTCCGCCTCCTGGGTTCAAGCAATTCTCCTGCCTAAGCCTCCCGAGTAGCTGGGACTACA
GGCACGTGCCACCACGCTTGGCTAATTTTTGTATTTTTAGCAGAGATGAGGTTTCACCATGTTGGACAG
GCTGGTCTCGAACTCCTGACCTCAGGTGATCTGCCCACCTTGGCCTCCCAAAGTGTTGGGATTACAGGT
GTAAGCCACCATGCCTGGTCTGGAAAGCATTTAGATCACTGCTTGGTTTTAGCAAGAACTAGGAAAGG
TTGTCACATTATTCTCAATCTAAGAGAGTACATAAGCCAGGCC

[0828] Following Table 1 provides oligonucleoside mRNA target sequences of HCII, together with the corresponding positions in transcript NM_000185.4. It is to be understood that SEQ ID NO: 2 to 121 refer to human (Homo sapiens) mRNA sequences.

TABLE 1

| | Oligonucleoside mRNA target | Starting position |
|---|---|---|
| SEQ ID NO | sequence 5′→3′ | on NM_000185.4 |
| SEQ ID NO: 2 | GGUGAAUAAAUUCCCAGUGGAAA | 946 |
| SEQ ID NO: 3 | AACUGCAUCUACUUCAAAGGAUC | 920 |
| SEQ ID NO: 4 | CAACUGCAUCUACUUCAAAGGAU | 919 |
| SEQ ID NO: 5 | AAGGGAGAGACCCAUGAACAAGU | 557 |
| SEQ ID NO: 6 | UGGGUGAAUAAAUUCCCAGUGGA | 944 |
| SEQ ID NO: 7 | CUUCAGGAGGAAUUUUGGGUACA | 676 |
| SEQ ID NO: 8 | CAGCUGCCUGCUCUUCAUGGGAA | 1501 |
| SEQ ID NO: 9 | CUCACCAAGGGCCUCAUAAAAGA | 854 |
| SEQ ID NO: 10 | GACCUUUAUAUCCAGAAGCAGUU | 716 |
| SEQ ID NO: 11 | CUCAACUGCAUCUACUUCAAAGG | 917 |
| SEQ ID NO: 12 | AAGAGCCGGAUCCAGCGUCUUAA | 407 |
| SEQ ID NO: 13 | GGAUCCAGCGUCUUAACAUCCUC | 414 |
| SEQ ID NO: 14 | GGCAAAAAAGCAUGACAAACAGA | 1191 |
| SEQ ID NO: 15 | UUCAGGAGGAAUUUUGGGUACAC | 677 |
| SEQ ID NO: 16 | CACAACCACAACUUCCGGCUGAA | 974 |
| SEQ ID NO: 17 | AUGGCAAAAAAGCAUGACAAACA | 1189 |
| SEQ ID NO: 18 | GUGAAUAAAUUCCCAGUGGAAAU | 947 |
| SEQ ID NO: 19 | GGGGGCAUCAGCAUGCUAAUUGU | 1100 |
| SEQ ID NO: 20 | CAAAAAAGCAUGACAAACAGAAC | 1193 |
| SEQ ID NO: 21 | GAGAGUAUUACUUUGCUGAGGCC | 771 |
| SEQ ID NO: 22 | UUUCCUUAGGUCUGAAGGGAGAG | 543 |
| SEQ ID NO: 23 | GCCAUCGACCUGUUCAAGCACCA | 1346 |
| SEQ ID NO: 24 | GCUCACCAAGGGCCUCAUAAAAG | 853 |
| SEQ ID NO: 25 | UGAAUAAAUUCCCAGUGGAAAUG | 948 |
| SEQ ID NO: 26 | UGGCAAAAAAGCAUGACAAACAG | 1190 |
| SEQ ID NO: 27 | ACUUCCGGCUGAAUGAGAGAGAG | 984 |
| SEQ ID NO: 28 | AAGCAUGACAAACAGAACUCGAG | 1198 |
| SEQ ID NO: 29 | GCCUGCUCUUCAUGGGAAGAGUG | 1506 |
| SEQ ID NO: 30 | AGAGAGUAUUACUUUGCUGAGGC | 770 |
| SEQ ID NO: 31 | CUCUUCAGGAGGAAUUUUGGGUA | 674 |
| SEQ ID NO: 32 | AAAAGCAUGACAAACAGAACUCG | 1196 |
| SEQ ID NO: 33 | GGGUGAAUAAAUUCCCAGUGGAA | 945 |
| SEQ ID NO: 34 | CCGGAUCCAGCGUCUUAACAUCC | 412 |
| SEQ ID NO: 35 | AUGACAAACAGAACUCGAGAAGU | 1202 |
| SEQ ID NO: 36 | GCAUCUCAGACCAAAGGAUCGCC | 1326 |
| SEQ ID NO: 37 | CACAACUUCCGGCUGAAUGAGAG | 980 |
| SEQ ID NO: 38 | UCUUCAGGAGGAAUUUUGGGUAC | 675 |
| SEQ ID NO: 39 | AAGAGAGUAUUACUUUGCUGAGG | 769 |
| SEQ ID NO: 40 | AACCACAACUUCCGGCUGAAUGA | 977 |
| SEQ ID NO: 41 | GCCGGAUCCAGCGUCUUAACAUC | 411 |
| SEQ ID NO: 42 | AUUCUCAACUGCAUCUACUUCAA | 914 |
| SEQ ID NO: 43 | AGGCAUCUCAGACCAAAGGAUCG | 1324 |
| SEQ ID NO: 44 | AAAAAGCAUGACAAACAGAACUC | 1195 |
| SEQ ID NO: 45 | GCUCUGGAGAAUAUAGACCCUGC | 878 |
| SEQ ID NO: 46 | UAAGAGAGUAUUACUUUGCUGAG | 768 |
| SEQ ID NO: 47 | UUCCGGCUGAAUGAGAGAGAGGU | 986 |
| SEQ ID NO: 48 | AUCCUGGGUGAAUAAAUUCCCAG | 940 |
| SEQ ID NO: 49 | UCCUUAGGUCUGAAGGGAGAGAC | 545 |
| SEQ ID NO: 50 | AACUUCCGGCUGAAUGAGAGAGA | 983 |
| SEQ ID NO: 51 | AAUAAAUUCCCAGUGGAAAUGAC | 950 |
| SEQ ID NO: 52 | ACAACCACAACUUCCGGCUGAAU | 975 |
| SEQ ID NO: 53 | CUGGAGAAUAUAGACCCUGCUAC | 881 |
| SEQ ID NO: 54 | CGCCAUCGACCUGUUCAAGCACC | 1345 |
| SEQ ID NO: 55 | GAUUCUCAACUGCAUCUACUUCA | 913 |
| SEQ ID NO: 56 | GAUCCAGCGUCUUAACAUCCUCA | 415 |
| SEQ ID NO: 57 | GCAGGCAUCUCAGACCAAAGGAU | 1322 |
| SEQ ID NO: 58 | AUGCCGCUGUCCACCCAAGUCCG | 1430 |
| SEQ ID NO: 59 | GCAUGACAAACAGAACUCGAGAA | 1200 |
| SEQ ID NO: 60 | GUGGGGUUCAUGCCGCUGUCCAC | 1421 |
| SEQ ID NO: 61 | CGGAUCCAGCGUCUUAACAUCCU | 413 |
| SEQ ID NO: 62 | CACCCAAGUCCGCUUCACUGUCG | 1441 |
| SEQ ID NO: 63 | CAACUUCCGGCUGAAUGAGAGAG | 982 |
| SEQ ID NO: 64 | AGUAUUACUUUGCUGAGGCCCAG | 774 |
| SEQ ID NO: 65 | CUCUGGAGAAUAUAGACCCUGCU | 879 |
| SEQ ID NO: 66 | GAUGAUUCUCAACUGCAUCUACU | 910 |
| SEQ ID NO: 67 | CAUGCCGCUGUCCACCCAAGUCC | 1429 |
| SEQ ID NO: 68 | UUCUCAACUGCAUCUACUUCAAA | 915 |
| SEQ ID NO: 69 | CAACCACAACUUCCGGCUGAAUG | 976 |
| SEQ ID NO: 70 | CACGGUGGGGUUCAUGCCGCUGU | 1417 |
| SEQ ID NO: 71 | CUUCCGGCUGAAUGAGAGAGAGG | 985 |
| SEQ ID NO: 72 | CCUCUUCAGGAGGAAUUUUGGGU | 673 |
| SEQ ID NO: 73 | GAGUAUUACUUUGCUGAGGCCCA | 773 |
| SEQ ID NO: 74 | AUGAUUCUCAACUGCAUCUACUU | 911 |
| SEQ ID NO: 75 | GGCAUCUCAGACCAAAGGAUCGC | 1325 |
| SEQ ID NO: 76 | CAGGCAUCUCAGACCAAAGGAUC | 1323 |
| SEQ ID NO: 77 | UCUCAACUGCAUCUACUUCAAAG | 916 |
| SEQ ID NO: 78 | CCCAAGUCCGCUUCACUGUCGAC | 1443 |
| SEQ ID NO: 79 | GGGGGGCAUCAGCAUGCUAAUUG | 1099 |
| SEQ ID NO: 80 | AGAGUAUUACUUUGCUGAGGCCC | 772 |
| SEQ ID NO: 81 | ACGGUGGGGUUCAUGCCGCUGUC | 1418 |
| SEQ ID NO: 82 | GCACCAGCUGCCUGCUCUUCAUG | 1497 |
| SEQ ID NO: 83 | CCUGGGUGAAUAAAUUCCCAGUG | 942 |
| SEQ ID NO: 84 | GCAAAAAAGCAUGACAAACAGAA | 1192 |
| SEQ ID NO: 85 | ACCCAAGUCCGCUUCACUGUCGA | 1442 |
| SEQ ID NO: 86 | GCAAGAGCCGGAUCCAGOGUCUU | 405 |
| SEQ ID NO: 87 | AAAAAAGCAUGACAAACAGAACU | 1194 |
| SEQ ID NO: 88 | GUUCAUGCCGCUGUCCACCCAAG | 1426 |
| SEQ ID NO: 89 | AAAGCAUGACAAACAGAACUCGA | 1197 |
| SEQ ID NO: 90 | GACACACAACCACAACUUCCGGC | 970 |
| SEQ ID NO: 91 | CACACAACCACAACUUCCGGCUG | 972 |
| SEQ ID NO: 92 | CAAGAGCCGGAUCCAGCGUCUUA | 406 |
| SEQ ID NO: 93 | ACACAACCACAACUUCCGGCUGA | 973 |
| SEQ ID NO: 94 | CCAUCGACCUGUUCAAGCACCAA | 1347 |
| SEQ ID NO: 95 | CGGGUGGUGGAGAGAUGGCAAAA | 1175 |
| SEQ ID NO: 96 | CCACCCAAGUCCGCUUCACUGUC | 1440 |
| SEQ ID NO: 97 | AGCAUGACAAACAGAACUCGAGA | 1199 |
| SEQ ID NO: 98 | GAGCCGGAUCCAGCGUCUUAACA | 409 |
| SEQ ID NO: 99 | UGGCAAGAGCCGGAUCCAGCGUC | 403 |
| SEQ ID NO: 100 | AUGGCAAGAGCCGGAUCCAGCGU | 402 |
| SEQ ID NO: 101 | GGUGGGGUUCAUGCCGCUGUCCA | 1420 |
| SEQ ID NO: 102 | AAUAAAUUCCCAGUGGAAA | 950 |
| SEQ ID NO: 103 | GCAUCUACUUCAAAGGAUC | 924 |
| SEQ ID NO: 104 | UGCAUCUACUUCAAAGGAU | 923 |
| SEQ ID NO: 105 | GAGAGACCCAUGAACAAGU | 561 |
| SEQ ID NO: 106 | UGAAUAAAUUCCCAGUGGA | 948 |
| SEQ ID NO: 107 | AGGAGGAAUUUUGGGUACA | 680 |
| SEQ ID NO: 108 | UGCCUGCUCUUCAUGGGAA | 1505 |
| SEQ ID NO: 109 | CCAAGGGCCUCAUAAAAGA | 858 |
| SEQ ID NO: 110 | UUUAUAUCCAGAAGCAGUU | 720 |
| SEQ ID NO: 111 | ACUGCAUCUACUUCAAAGG | 921 |
| SEQ ID NO: 112 | GCCGGAUCCAGCGUCUUAA | 411 |
| SEQ ID NO: 113 | CCAGCGUCUUAACAUCCUC | 418 |
| SEQ ID NO: 114 | AAAAAGCAUGACAAACAGA | 1195 |
| SEQ ID NO: 115 | GGAGGAAUUUUGGGUACAC | 681 |
| SEQ ID NO: 116 | ACCACAACUUCCGGCUGAA | 978 |
| SEQ ID NO: 117 | CAAAAAAGCAUGACAAACA | 1193 |
| SEQ ID NO: 118 | AUAAAUUCCCAGUGGAAAU | 951 |
| SEQ ID NO: 119 | GCAUCAGCAUGCUAAUUGU | 1104 |
| SEQ ID NO: 120 | AAAGCAUGACAAACAGAAC | 1197 |
| SEQ ID NO: 121 | GUAUUACUUUGCUGAGGCC | 775 |

[0829] Table 2 provides the unmodified first (antisense) and corresponding unmodified second (sense) strand sequences for siRNA oligonucleosides according to the present invention, together with the corresponding positions in the overall gene sequence of SEQ ID NO: 1 as follows.

TABLE 2

| | First (Antisense) Strand | | Second (Sense) Strand | |
|---|---|---|---|---|
| | Base Sequence 5′→3′ | | Base Sequence 5′→3′ | Corresponding |
| SEQ ID | (Shown as an Unmodified | SEQ ID | (Shown as an Unmodified | positions on |
| NO (AS) | Nucleoside Sequence) | NO (SS) | Nucleoside Sequence) | NM_000185.4 |
| SEQ ID | GUUCUGUUUGUCAUGCUUU | SEQ ID | AAAAAGCAUGACAAACA | 1193-1214 |
| NO: 140 | UUUG | NO: 260 | GAAC | |
| SEQ ID | CGAGUUCUGUUUGUCAUGC | SEQ ID | AAGCAUGACAAACAGAA | 1196-1217 |
| NO: 152 | UUUU | NO: 272 | CUCG | |
| SEQ ID | UUUCCACUGGGAAUUUAUU | SEQ ID | UGAAUAAAUUCCCAGUG | 946-967 |
| NO: 122 | CACC | NO: 242 | GAAA | |
| SEQ ID | GAUCCUUUGAAGUAGAUGC | SEQ ID | CUGCAUCUACUUCAAAG | 920-941 |
| NO: 123 | AGUU | NO: 243 | GAUC | |
| SEQ ID | AUCCUUUGAAGUAGAUGCA | SEQ ID | ACUGCAUCUACUUCAAA | 919-940 |
| NO: 124 | GUUG | NO: 244 | GGAU | |
| SEQ ID | ACUUGUUCAUGGGUCUCUC | SEQ ID | GGGAGAGACCCAUGAAC | 557-578 |
| NO: 125 | CCUU | NO: 245 | AAGU | |
| SEQ ID | UCCACUGGGAAUUUAUUCA | SEQ ID | GGUGAAUAAAUUCCCAG | 944-965 |
| NO: 126 | CCCA | NO: 246 | UGGA | |
| SEQ ID | UGUACCCAAAAUUCCUCCU | SEQ ID | UCAGGAGGAAUUUUGGG | 676-697 |
| NO: 127 | GAAG | NO: 247 | UACA | |
| SEQ ID | UUCCCAUGAAGAGCAGGCA | SEQ ID | GCUGCCUGCUCUUCAUG | 1501-1522 |
| NO: 128 | GCUG | NO: 248 | GGAA | |
| SEQ ID | UCUUUUAUGAGGOCCUUGG | SEQ ID | CACCAAGGGCCUCAUAA | 854-875 |
| NO: 129 | UGAG | NO: 249 | AAGA | |
| SEQ ID | AACUGCUUCUGGAUAUAAA | SEQ ID | CCUUUAUAUCCAGAAGC | 716-737 |
| NO: 130 | GGUC | NO: 250 | AGUU | |
| SEQ ID | CCUUUGAAGUAGAUGCAGU | SEQ ID | CAACUGCAUCUACUUCA | 917-938 |
| NO: 131 | UGAG | NO: 251 | AAGG | |
| SEQ ID | UUAAGACGCUGGAUCCGGC | SEQ ID | GAGCCGGAUCCAGCGUC | 407-428 |
| NO: 132 | UCUU | NO: 252 | UUAA | |
| SEQ ID | GAGGAUGUUAAGACGCUGG | SEQ ID | AUCCAGCGUCUUAACAU | 414-435 |
| NO: 133 | AUCC | NO: 253 | CCUC | |
| SEQ ID | UCUGUUUGUCAUGCUUUUU | SEQ ID | CAAAAAAGCAUGACAAA | 1191-1212 |
| NO: 134 | UGCC | NO: 254 | CAGA | |
| SEQ ID | GUGUACCCAAAAUUCCUCC | SEQ ID | CAGGAGGAAUUUUGGGU | 677-698 |
| NO: 135 | UGAA | NO: 255 | ACAC | |
| SEQ ID | UUCAGCCGGAAGUUGUGGU | SEQ TD | CAACCACAACUUCCGGC | 974-995 |
| NO: 136 | UGUG | NO: 256 | UGAA | |
| SEQ ID | UGUUUGUCAUGCUUUUUUG | SEQ ID | GGCAAAAAAGCAUGACA | 1189-1210 |
| NO: 137 | CCAU | NO: 257 | AACA | |
| SEQ ID | AUUUCCACUGGGAAUUUAU | SEQ ID | GAAUAAAUUCCCAGUGG | 947-968 |
| NO: 138 | UCAC | NO: 258 | AAAU | |
| SEQ ID | ACAAUUAGCAUGCUGAUGC | SEQ ID | GGGCAUCAGCAUGCUAA | 1100-1121 |
| NO: 139 | CCCC | NO: 259 | UUGU | |
| SEQ ID | GGCCUCAGCAAAGUAAUAC | SEQ ID | GAGUAUUACUUUGCUGA | 771-792 |
| NO: 141 | UCUC | NO: 261 | GGCC | |
| SEQ ID | CUCUCCCUUCAGACCUAAG | SEQ ID | UCCUUAGGUCUGAAGGG | 543-564 |
| NO: 142 | GAAA | NO: 262 | AGAG | |
| SEQ ID | UGGUGCUUGAACAGGUCGA | SEQ ID | CAUCGACCUGUUCAAGC | 1346-1367 |
| NO: 143 | UGGC | NO: 263 | ACCA | |
| SEQ ID | CUUUUAUGAGGCCCUUGGU | SEQ ID | UCACCAAGGGCCUCAUA | 853-874 |
| NO: 144 | GAGC | NO: 264 | AAAG | |
| SEQ ID | CAUUUCCACUGGGAAUUUA | SEQ ID | AAUAAAUUCCCAGUGGA | 948-969 |
| NO: 145 | UUCA | NO: 265 | AAUG | |
| SEQ ID | CUGUUUGUCAUGCUUUUUU | SEQ ID | GCAAAAAAGCAUGACAA | 1190-1211 |
| NO: 146 | GCCA | NO: 266 | ACAG | |
| SEQ ID | CUCUCUCUCAUUCAGCCGG | SEQ ID | UUCCGGCUGAAUGAGAG | 984-1005 |
| NO: 147 | AAGU | NO: 267 | AGAG | |
| SEQ ID | CUCGAGUUCUGUUUGUCAU | SEQ ID | GCAUGACAAACAGAACU | 1198-1219 |
| NO: 148 | GCUU | NO: 268 | CGAG | |
| SEQ ID | CACUCUUCCCAUGAAGAGC | SEQ ID | CUGCUCUUCAUGGGAAG | 1506-1527 |
| NO: 149 | AGGC | NO: 269 | AGUG | |
| SEQ ID | GCCUCAGCAAAGUAAUACU | SEQ ID | AGAGUAUUACUUUGCUG | 770-791 |
| NO: 150 | CUCU | NO: 270 | AGGC | |
| SEQ ID | UACCCAAAAUUCCUCCUGA | SEQ ID | CUUCAGGAGGAAUUUUG | 674-695 |
| NO: 151 | AGAG | NO: 271 | GGUA | |
| SEQ ID | UUCCACUGGGAAUUUAUUC | SEQ ID | GUGAAUAAAUUCCCAGU | 945-966 |
| NO: 153 | ACCC | NO: 273 | GGAA | |
| SEQ ID | GGAUGUUAAGACGCUGGAU | SEQ ID | GGAUCCAGCGUCUUAAC | 412-433 |
| NO: 154 | CCGG | NO: 274 | AUCC | |
| SEQ ID | ACUUCUCGAGUUCUGUUUG | SEQ ID | GACAAACAGAACUCGAG | 1202-1223 |
| NO: 155 | UCAU | NO: 275 | AAGU | |
| SEQ ID | GGCGAUCCUUUGGUCUGAG | SEQ ID | AUCUCAGACCAAAGGAU | 1326-1347 |
| NO: 156 | AUGC | NO: 276 | CGCC | |
| SEQ ID | CUCUCAUUCAGCCGGAAGU | SEQ ID | CAACUUCCGGCUGAAUG | 980-1001 |
| NO: 157 | UGUG | NO: 277 | AGAG | |
| SEQ ID | GUACCCAAAAUUCCUCCUG | SEQ ID | UUCAGGAGGAAUUUUGG | 675-696 |
| NO: 158 | AAGA | NO: 278 | GUAC | |
| SEQ ID | CCUCAGCAAAGUAAUACUC | SEQ ID | GAGAGUAUUACUUUGCU | 769-790 |
| NO: 159 | UCUU | NO: 279 | GAGG | |
| SEQ ID | UCAUUCAGCCGGAAGUUGU | SEQ ID | CCACAACUUCOGGCUGA | 977-998 |
| NO: 160 | GGUU | NO: 280 | AUGA | |
| SEQ ID | GAUGUUAAGACGCUGGAUC | SEQ ID | CGGAUCCAGCGUCUUAA | 411-432 |
| NO: 161 | CGGC | NO: 281 | CAUC | |
| SEQ ID | UUGAAGUAGAUGCAGUUGA | SEQ ID | UCUCAACUGCAUCUACU | 914-935 |
| NO: 162 | GAAU | NO: 282 | UCAA | |
| SEQ ID | CGAUCCUUUGGUCUGAGAU | SEQ ID | GCAUCUCAGACCAAAGG | 1324-1345 |
| NO: 163 | GCCU | NO: 283 | AUCG | |
| SEQ ID | GAGUUCUGUUUGUCAUGCU | SEQ ID | AAAGCAUGACAAACAGA | 1195-1216 |
| NO: 164 | UUUU | NO: 284 | ACUC | |
| SEQ ID | GCAGGGUCUAUAUUCUCCA | SEQ ID | UCUGGAGAAUAUAGACC | 878-899 |
| NO: 165 | GAGC | NO: 285 | CUGC | |
| SEQ ID | CUCAGCAAAGUAAUACUCU | SEQ ID | AGAGAGUAUUACUUUGC | 768-789 |
| NO: 166 | CUUA | NO: 286 | UGAG | |
| SEQ ID | ACCUCUCUCUCAUUCAGCC | SEQ ID | CCGGCUGAAUGAGAGAG | 986-1007 |
| NO: 167 | GGAA | NO: 287 | AGGU | |
| SEQ ID | CUGGGAAUUUAUUCACCCA | SEQ ID | CCUGGGUGAAUAAAUUC | 940-961 |
| NO: 168 | GGAU | NO: 288 | CCAG | |
| SEQ ID | GUCUCUCCCUUCAGACCUA | SEQ ID | CUUAGGUCUGAAGGGAG | 545-566 |
| NO: 169 | AGGA | NO: 289 | AGAC | |
| SEQ ID | UCUCUCUCAUUCAGCCGGA | SEQ ID | CUUCCGGCUGAAUGAGA | 983-1004 |
| NO: 170 | AGUU | NO: 290 | GAGA | |
| SEQ ID | GUCAUUUCCACUGGGAAUU | SEQ ID | UAAAUUCCCAGUGGAAA | 950-971 |
| NO: 171 | UAUU | NO: 291 | UGAC | |
| SEQ ID | AUUCAGCCGGAAGUUGUGG | SEQ ID | AACCACAACUUCCGGCU | 975-996 |
| NO: 172 | UUGU | NO: 292 | GAAU | |
| SEQ ID | GUAGCAGGGUCUAUAUUCU | SEQ ID | GGAGAAUAUAGACCCUG | 881-902 |
| NO: 173 | CCAG | NO: 293 | CUAC | |
| SEQ ID | GGUGCUUGAACAGGUCGAU | SEQ ID | CCAUCGACCUGUUCAAG | 1345-1366 |
| NO: 174 | GGCG | NO: 294 | CACC | |
| SEQ ID | UGAAGUAGAUGCAGUUGAG | SEQ ID | UUCUCAACUGCAUCUAC | 913-934 |
| NO: 175 | AAUC | NO: 295 | UUCA | |
| SEQ ID | UGAGGAUGUUAAGACGCUG | SEQ ID | UCCAGCGUCUUAACAUC | 415-436 |
| NO: 176 | GAUC | NO: 296 | CUCA | |
| SEQ ID | AUCCUUUGGUCUGAGAUGC | SEQ ID | AGGCAUCUCAGACCAAA | 1322-1343 |
| NO: 177 | CUGC | NO: 297 | GGAU | |
| SEQ ID | CGGACUUGGGUGGACAGCG | SEQ ID | GCCGCUGUCCACCCAAG | 1430-1451 |
| NO: 178 | GCAU | NO: 298 | UCCG | |
| SEQ ID | UUCUCGAGUUCUGUUUGUC | SEQ ID | AUGACAAACAGAACUCG | 1200-1221 |
| NO: 179 | AUGC | NO: 299 | AGAA | |
| SEQ ID | GUGGACAGCGGCAUGAACC | SEQ ID | GGGGUUCAUGCCGCUGU | 1421-1442 |
| NO: 180 | CCAC | NO: 300 | CCAC | |
| SEQ ID | AGGAUGUUAAGACGCUGGA | SEQ ID | GAUCCAGCGUCUUAACA | 413-434 |
| NO: 181 | UCCG | NO: 301 | UCCU | |
| SEQ ID | CGACAGUGAAGCGGACUUG | SEQ ID | CCCAAGUCCGCUUCACU | 1441-1462 |
| NO: 182 | GGUG | NO: 302 | GUCG | |
| SEQ ID | CUCUCUCAUUCAGCCGGAA | SEQ ID | ACUUCCGGCUGAAUGAG | 982-1003 |
| NO: 183 | GUUG | NO: 303 | AGAG | |
| SEQ ID | CUGGGCCUCAGCAAAGUAA | SEQ ID | UAUUACUUUGCUGAGGC | 774-795 |
| NO: 184 | UACU | NO: 304 | CCAG | |
| SEQ ID | AGCAGGGUCUAUAUUCUCC | SEQ ID | CUGGAGAAUAUAGACCC | 879-900 |
| NO: 185 | AGAG | NO: 305 | UGCU | |
| SEQ ID | AGUAGAUGCAGUUGAGAAU | SEQ ID | UGAUUCUCAACUGCAUC | 910-931 |
| NO: 186 | CAUC | NO: 306 | UACU | |
| SEQ ID | GGACUUGGGUGGACAGCGG | SEQ ID | UGCCGCUGUCCACCCAA | 1429-1450 |
| NO: 187 | CAUG | NO: 307 | GUCC | |
| SEQ ID | UUUGAAGUAGAUGCAGUUG | SEQ ID | CUCAACUGCAUCUACUU | 915-936 |
| NO: 188 | AGAA | NO: 308 | CAAA | |
| SEQ ID | CAUUCAGCCGGAAGUUGUG | SEQ ID | ACCACAACUUCCGGCUG | 976-997 |
| NO: 189 | GUUG | NO: 309 | AAUG | |
| SEQ ID | ACAGCGGCAUGAACCCCAC | SEQ ID | CGGUGGGGUUCAUGCCG | 1417-1438 |
| NO: 190 | CGUG | NO: 310 | CUGU | |
| SEQ ID | CCUCUCUCUCAUUCAGCCG | SEQ ID | UCCGGCUGAAUGAGAGA | 985-1006 |
| NO: 191 | GAAG | NO: 311 | GAGG | |
| SEQ ID | ACCCAAAAUUCCUCCUGAA | SEQ ID | UCUUCAGGAGGAAUUUU | 673-694 |
| NO: 192 | GAGG | NO: 312 | GGGU | |
| SEQ ID | UGGGCCUCAGCAAAGUAAU | SEQ ID | GUAUUACUUUGCUGAGG | 773-794 |
| NO: 193 | ACUC | NO: 313 | CCCA | |
| SEQ ID | AAGUAGAUGCAGUUGAGAA | SEQ ID | GAUUCUCAACUGCAUCU | 911-932 |
| NO: 194 | UCAU | NO: 314 | ACUU | |
| SEQ ID | GCGAUCCUUUGGUCUGAGA | SEQ ID | CAUCUCAGACCAAAGGA | 1325-1346 |
| NO: 195 | UGCC | NO: 315 | UCGC | |
| SEQ ID | GAUCCUUUGGUCUGAGAUG | SEQ ID | GGCAUCUCAGACCAAAG | 1323-1344 |
| NO: 196 | CCUG | NO: 316 | GAUC | |
| SEQ ID | CUUUGAAGUAGAUGCAGUU | SEQ ID | UCAACUGCAUCUACUUC | 916-937 |
| NO: 197 | GAGA | NO: 317 | AAAG | |
| SEQ ID | GUCGACAGUGAAGCGGACU | SEQ ID | CAAGUCCGCUUCACUGU | 1443-1464 |
| NO: 198 | UGGG | NO: 318 | CGAC | |
| SEQ ID | CAAUUAGCAUGCUGAUGCC | SEQ ID | GGGGCAUCAGCAUGCUA | 1099-1120 |
| NO: 199 | CCCC | NO: 319 | AUUG | |
| SEQ ID | GGGCCUCAGCAAAGUAAUA | SEQ ID | AGUAUUACUUUGCUGAG | 772-793 |
| NO: 200 | CUCU | NO: 320 | GCCC | |
| SEQ ID | GACAGCGGCAUGAACCCCA | SEQ ID | GGUGGGGUUCAUGCCGC | 1418-1439 |
| NO: 201 | CCGU | NO: 321 | UGUC | |
| SEQ ID | CAUGAAGAGCAGGCAGCUG | SEQ ID | ACCAGCUGCCUGCUCUU | 1497-1518 |
| NO: 202 | GUGC | NO: 322 | CAUG | |
| SEQ ID | CACUGGGAAUUUAUUCACC | SEQ ID | UGGGUGAAUAAAUUCCC | 942-963 |
| NO: 203 | CAGG | NO: 323 | AGUG | |
| SEQ ID | UUCUGUUUGUCAUGCUUUU | SEQ ID | AAAAAAGCAUGACAAAC | 1192-1213 |
| NO: 204 | UUGC | NO: 324 | AGAA | |
| SEQ ID | UCGACAGUGAAGCGGACUU | SEQ ID | CCAAGUCCGCUUCACUG | 1442-1463 |
| NO: 205 | GGGU | NO: 325 | UCGA | |
| SEQ ID | AAGACGCUGGAUCCGGCUC | SEQ ID | AAGAGCCGGAUCCAGCG | 405-426 |
| NO: 206 | UUGC | NO: 326 | UCUU | |
| SEQ ID | AGUUCUGUUUGUCAUGCUU | SEQ ID | AAAAGCAUGACAAACAG | 1194-1215 |
| NO: 207 | UUUU | NO: 327 | AACU | |
| SEQ ID | CUUGGGUGGACAGCGGCAU | SEQ ID | UCAUGCCGCUGUCCACC | 1426-1447 |
| NO: 208 | GAAC | NO: 328 | CAAG | |
| SEQ ID | UCGAGUUCUGUUUGUCAUG | SEQ ID | AGCAUGACAAACAGAAC | 1197-1218 |
| NO: 209 | CUUU | NO: 329 | UCGA | |
| SEQ ID | GCCGGAAGUUGUGGUUGUG | SEQ ID | CACACAACCACAACUUC | 970-991 |
| NO: 210 | UGUC | NO: 330 | CGGC | |
| SEQ ID | CAGCCGGAAGUUGUGGUUG | SEQ ID | CACAACCACAACUUCCG | 972-993 |
| NO: 211 | UGUG | NO: 331 | GCUG | |
| SEQ ID | UAAGACGCUGGAUCCGGCU | SEQ ID | AGAGCCGGAUCCAGCGU | 406-427 |
| NO: 212 | CUUG | NO: 332 | CUUA | |
| SEQ ID | UCAGCCGGAAGUUGUGGUU | SEQ ID | ACAACCACAACUUCCGG | 973-994 |
| NO: 213 | GUGU | NO: 333 | CUGA | |
| SEQ ID | UUGGUGCUUGAACAGGUCG | SEQ ID | AUCGACCUGUUCAAGCA | 1347-1368 |
| NO: 214 | AUGG | NO: 334 | CCAA | |
| SEQ ID | UUUUGCCAUCUCUCCACCA | SEQ ID | GGUGGUGGAGAGAUGGC | 1175-1196 |
| NO: 215 | CCCG | NO: 335 | AAAA | |
| SEQ ID | GACAGUGAAGCGGACUUGG | SEQ ID | ACCCAAGUCCGCUUCAC | 1440-1461 |
| NO: 216 | GUGG | NO: 336 | UGUC | |
| SEQ ID | UCUCGAGUUCUGUUUGUCA | SEQ ID | CAUGACAAACAGAACUC | 1199-1220 |
| NO: 217 | UGCU | NO: 337 | GAGA | |
| SEQ ID | UGUUAAGACGCUGGAUCCG | SEQ ID | GCCGGAUCCAGCGUCUU | 409-430 |
| NO: 218 | GCUC | NO: 338 | AACA | |
| SEQ ID | GACGCUGGAUCCGGCUCUU | SEQ ID | GCAAGAGCCGGAUCCAG | 403-424 |
| NO: 219 | GCCA | NO: 339 | CGUC | |
| SEQ ID | ACGCUGGAUCCGGCUCUUG | SEQ ID | GGCAAGAGCCGGAUCCA | 402-423 |
| NO: 220 | CCAU | NO: 340 | GCGU | |
| SEQ ID | UGGACAGCGGCAUGAACCC | SEQ ID | UGGGGUUCAUGCCGCUG | 1420-1441 |
| NO: 221 | CACC | NO: 341 | UCCA | |
| SEQ ID | UUUCCACUGGGAAUUUAUU | SEQ ID | AAUAAAUUCCCAGUGGA | 950-969 |
| NO: 222 | | NO: 342 | AA | |
| SEQ ID | GAUCCUUUGAAGUAGAUGC | SEQ ID | GCAUCUACUUCAAAGGA | 924-943 |
| NO: 223 | | NO: 343 | UC | |
| SEQ ID | AUCCUUUGAAGUAGAUGCA | SEQ ID | UGCAUCUACUUCAAAGG | 923-942 |
| NO: 224 | | NO: 344 | AU | |
| SEQ ID | ACUUGUUCAUGGGUCUCUC | SEQ ID | GAGAGACCCAUGAACAA | 561-580 |
| NO: 225 | | NO: 345 | GU | |
| SEQ ID | UCCACUGGGAAUUUAUUCA | SEQ ID | UGAAUAAAUUCCCAGUG | 948-967 |
| NO: 226 | | NO: 346 | GA | |
| SEQ ID | UGUACCCAAAAUUCCUCCU | SEQ ID | AGGAGGAAUUUUGGGUA | 680-699 |
| NO: 227 | | NO: 347 | CA | |
| SEQ ID | UUCCCAUGAAGAGCAGGCA | SEQ ID | UGCCUGCUCUUCAUGGG | 1505-1524 |
| NO: 228 | | NO: 348 | AA | |
| SEQ ID | UCUUUUAUGAGGCCCUUGG | SEQ ID | CCAAGGGCCUCAUAAAA | 858-877 |
| NO: 229 | | NO: 349 | GA | |
| SEQ ID | AACUGCUUCUGGAUAUAAA | SEQ ID | UUUAUAUCCAGAAGCAG | 720-739 |
| NO: 230 | | NO: 350 | UU | |
| SEQ ID | CCUUUGAAGUAGAUGCAGU | SEQ ID | ACUGCAUCUACUUCAAA | 921-940 |
| NO: 231 | | NO: 351 | GG | |
| SEQ ID | UUAAGACGCUGGAUCCGGC | SEQ ID | GCCGGAUCCAGCGUCUU | 411-430 |
| NO: 232 | | NO: 352 | AA | |
| SEQ ID | GAGGAUGUUAAGACGCUGG | SEQ ID | CCAGCGUCUUAACAUCC | 418-437 |
| NO: 233 | | NO: 353 | UC | |
| SEQ ID | UCUGUUUGUCAUGCUUUUU | SEQ ID | AAAAAGCAUGACAAACA | 1195-1214 |
| NO: 234 | | NO: 354 | GA | |
| SEQ ID | GUGUACCCAAAAUUCCUCC | SEQ ID | GGAGGAAUUUUGGGUAC | 681-700 |
| NO: 235 | | NO: 355 | AC | |
| SEQ ID | UUCAGCCGGAAGUUGUGGU | SEQ ID | ACCACAACUUCCGGCUG | 978-997 |
| NO: 236 | | NO: 356 | AA | |
| SEQ ID | UGUUUGUCAUGCUUUUUUG | SEQ ID | CAAAAAAGCAUGACAAA | 1193-1212 |
| NO: 237 | | NO: 357 | CA | |
| SEQ ID | AUUUCCACUGGGAAUUUAU | SEQ ID | AUAAAUUCCCAGUGGAA | 951-970 |
| NO: 238 | | NO: 358 | AU | |
| SEQ ID | ACAAUUAGCAUGCUGAUGC | SEQ ID | GCAUCAGCAUGCUAAUU | 1104-1123 |
| NO: 239 | | NO: 359 | GU | |
| SEQ ID | GUUCUGUUUGUCAUGCUUU | SEQ ID | AAAGCAUGACAAACAGA | 1197-1216 |
| NO: 240 | | NO: 360 | AC | |
| SEQ ID | GGCCUCAGCAAAGUAAUAC | SEQ ID | GUAUUACUUUGCUGAGG | 775-794 |
| NO: 241 | | NO: 361 | CC | |

[0830] Table 3 provides the modified first (antisense) sequences, together with the corresponding unmodified first (antisense) sequences for siRNA oligonucleosides according to the present invention as follows.

TABLE 3

| | | | Underlying Base Sequence | |
|---|---|---|---|---|
| | | SEQ ID | 5′→3′ | SEQ ID |
| Antisense | Modified First (Antisense) | NO | (Shown as an Unmodified | NO |
| strand ID | Strand 5′→3′ | (AS-mod) | Nucleoside Sequence) | (AS-unmod) |
| ETXS636 | GmsUfsUmCfUmGfUmUmUmGmUmCm | SEQ ID | GUUCUGUUUGUCAUG | SEQ ID |
| | AmUfGmCfUmUmUmUmUmsUmsGm | NO: 764 | CUUUUUUG | NO: 140 |
| ETXS644 | CmsGfsAmGfUmUfCmUmGmUmUmUm | SEQ ID | CGAGUUCUGUUUGUC | SEQ ID |
| | GmUfCmAfUmGmCmUmUmsUmsUm | NO: 768 | AUGCUUUU | NO: 152 |
| ETXS232 | UmsUfsUmCmCmAfCmUfGfGmGmAm | SEQ ID | UUUCCACUGGGAAUU | SEQ ID |
| | AmUfUmUfAmUmUmCmAmsCmsCm | NO: 362 | UAUUCACC | NO: 122 |
| ETXS234 | GmsAfsUmCmCmUfUmUfGfAmAmGm | SEQ ID | GAUCCUUUGAAGUAG | SEQ ID |
| | UmAfGmAfUmGmCmAmGmsUmsUm | NO: 363 | AUGCAGUU | NO: 123 |
| ETXS236 | AmsUfsCmCmUmUfUmGfAfAmGmUm | SEQ ID | AUCCUUUGAAGUAGA | SEQ ID |
| | AmGfAmUfGmCmAmGmUmsUmsGm | NO: 364 | UGCAGUUG | NO: 124 |
| ETXS238 | AmsCfsUmUmGmUfUmCfAfUmGmGm | SEQ ID | ACUUGUUCAUGGGUC | SEQ ID |
| | GmUfCmUfCmUmCmCmCmsUmsUm | NO: 365 | UCUCCCUU | NO: 125 |
| ETXS240 | UmsCfsCmAmCmUfGmGfGfAmAmUm | SEQ ID | UCCACUGGGAAUUUA | SEQ ID |
| | UmUfAmUfUmCmAmCmCmsCmsAm | NO: 366 | UUCACOCA | NO: 126 |
| ETXS242 | UmsGfsUmAmCmCfCmAfAfAmAmUm | SEQ ID | UGUACCCAAAAUUCC | SEQ ID |
| | UmCfCmUfCmCmUmGmAmsAmsGm | NO: 367 | UCCUGAAG | NO: 127 |
| ETXS244 | UmsUfsCmCmCmAfUmGIALAmGmAm | SEQ ID | UUCCCAUGAAGAGCA | SEQ ID |
| | GmCfAmGfGmCmAmGmCmsUmsGm | NO: 368 | GGCAGCUG | NO: 128 |
| ETXS246 | UmsCfsUmUmUmUfAmUfGfAmGmGm | SEQ ID | UCUUUUAUGAGGCCC | SEQ ID |
| | CmCfCmUfUmGmGmUmGmsAmsGm | NO: 369 | UUGGUGAG | NO: 129 |
| ETXS248 | AmsAfsCmUmGmCfUmUfCfUmGmGm | SEQ ID | AACUGCUUCUGGAUA | SEQ ID |
| | AmUfAmUfAmAmAmGmGmsUmsCm | NO: 370 | UAAAGGUC | NO: 130 |
| ETXS250 | CmsCfsUmUmUmGfAmAfGfUmAmGm | SEQ ID | CCUUUGAAGUAGAUG | SEQ ID |
| | AmUfGmCfAmGmUmUmGmsAmsGm | NO: 371 | CAGUUGAG | NO: 131 |
| ETXS252 | UmsUfsAmAmGmAfCmGfCfUmGmGm | SEQ ID | UUAAGACGCUGGAUC | SEQ ID |
| | AmUfCmCfGmGmCmUmCmsUmsUm | NO: 372 | CGGCUCUU | NO: 132 |
| ETXS254 | GmsAfsGmGmAmUfGmUfUfAmAmGm | SEQ ID | GAGGAUGUUAAGACG | SEQ ID |
| | AmCfGmCfUmGmGmAmUmsCmsCm | NO: 373 | CUGGAUCC | NO: 133 |
| ETXS256 | UmsCfsUmGmUmUfUmGfUfCmAmUm | SEQ ID | UCUGUUUGUCAUGCU | SEQ ID |
| | GmCfUmUfUmUmUmUmGmsCmsCm | NO: 374 | UUUUUGCC | NO: 134 |
| ETXS258 | GmsUfsGmUmAmCfCmCfAfAmAmAm | SEQ ID | GUGUACCCAAAAUUC | SEQ ID |
| | UmUfCmCfUmCmCmUmGmsAmsAm | NO: 375 | CUCCUGAA | NO: 135 |
| ETXS260 | UmsUfsCmAmGmCfCmGfGfAmAmGm | SEQ ID | UUCAGCCGGAAGUUG | SEQ ID |
| | UmUfGmUfGmGmUmUmGmsUmsGm | NO: 376 | UGGUUGUG | NO: 136 |
| ETXS262 | UmsGfsUmUmUmGfUmCfAfUmGmCm | SEQ ID | UGUUUGUCAUGCUUU | SEQ ID |
| | UmUfUmfUmUmGmCmCmsAmsUm | NO: 377 | UUUGCCAU | NO: 137 |
| ETXS264 | AmsUfsUmUmCmCfAmCfUfGmGmGm | SEQ ID | AUUUCCACUGGGAAU | SEQ ID |
| | AmAfUmUfUmAmUmUmCmsAmsCm | NO: 378 | UUAUUCAC | NO: 138 |
| ETXS266 | AmsCfsAmAmUmUfAmGfCfAmUmGm | SEQ ID | ACAAUUAGCAUGCUG | SEQ ID |
| | CmUfGmAfUmGmCmCmCmsCmsCm | NO: 379 | AUGCCCCC | NO: 139 |
| ETXS268 | GmsUfsUmCmUmGfUmUfUfGmUmCm | SEQ ID | GUUCUGUUUGUCAUG | SEQ ID |
| | AmUfGmCfUmUmUmUmUmsUmsGm | NO: 380 | CUUUUUUG | NO: 140 |
| ETXS270 | GmsGfsCmCmUmCfAmGfCfAmAmAm | SEQ ID | GGCCUCAGCAAAGUA | SEQ ID |
| | GmUfAmAfUmAmCmUmCmsUmsCm | NO: 381 | AUACUCUC | NO: 141 |
| ETXS272 | CmsUfsCmUmCmCfCmUfUfCmAmGm | SEQ ID | CUCUCCCUUCAGACC | SEQ ID |
| | AmCfCmUfAmAmGmGmAmsAmsAm | NO: 382 | UAAGGAAA | NO: 142 |
| ETXS274 | UmsGfsGmUmGmCfUmUfGfAmAmCm | SEQ ID | UGGUGCUUGAACAGG | SEQ ID |
| | AmGfGmUfCmGmAmUmGmsGmsCm | NO: 383 | UCGAUGGC | NO: 143 |
| ETXS276 | CmsUfsUmUmUmAfUmGfAfGmGmCm | SEQ ID | CUUUUAUGAGGOCCU | SEQ ID |
| | CmCfUmUfGmGmUmGmAmsGmsCm | NO: 384 | UGGUGAGC | NO: 144 |
| ETXS278 | CmsAfsUmUmUmCfCmAfCfUmGmGm | SEQ ID | CAUUUCCACUGGGAA | SEQ ID |
| | GmAfAmUfUmUmAmUmUmsCmsAm | NO: 385 | UUUAUUCA | NO: 145 |
| ETXS280 | CmsUfsGmUmUmUfGmUfCfAmUmGm | SEQ ID | CUGUUUGUCAUGCUU | SEQ ID |
| | CmUfUmUfUmUmUmGmCmsCmsAm | NO: 386 | UUUUGCCA | NO: 146 |
| ETXS282 | CmsUfsCmUmCmUfCmUfCfAmUmUm | SEQ ID | CUCUCUCUCAUUCAG | SEQ ID |
| | CmAfGmCfCmGmGmAmAmsGmsUm | NO: 387 | CCGGAAGU | NO: 147 |
| ETXS284 | CmsUfsCmGmAmGfUmUfCfUmGmUm | SEQ ID | CUCGAGUUCUGUUUG | SEQ ID |
| | UmUfGmUfCmAmUmGmCmsUmsUm | NO: 388 | UCAUGCUU | NO: 148 |
| ETXS286 | CmsAfsCmUmCmUfUmCfCfCmAmUm | SEQ ID | CACUCUUCCCAUGAA | SEQ ID |
| | GmAfAmGfAmGmCmAmGmsGmsCm | NO: 389 | GAGCAGGC | NO: 149 |
| ETXS288 | GmsCfsCmUmCmAfGmCfAfAmAmGm | SEQ ID | GCCUCAGCAAAGUAA | SEQ ID |
| | UmAfAmUfAmCmUmCmUmsCmsUm | NO: 390 | UACUCUCU | NO: 150 |
| ETXS290 | UmsAfsCmCmCmAfAmAfAfUmUmCm | SEQ ID | UACCCAAAAUUCCUC | SEQ ID |
| | CmUfCmCfUmGmAmAmGmsAmsGm | NO: 391 | CUGAAGAG | NO: 151 |
| ETXS292 | CmsGfsAmGmUmUfCmUfGfUmUmUm | SEQ ID | CGAGUUCUGUUUGUC | SEQ ID |
| | GmUfCmAfUmGmCmUmUmsUmsUm | NO: 392 | AUGCUUUU | NO: 152 |
| ETXS294 | UmsUfsCmCmAmCfUmGfGfGmAmAm | SEQ ID | UUCCACUGGGAAUUU | SEQ ID |
| | UmUfUmAfUmUmCmAmCmsCmsCm | NO: 393 | AUUCACCC | NO: 153 |
| ETXS296 | GmsGfsAmUmGmUfUmAfAfGmAmCm | SEQ ID | GGAUGUUAAGACGCU | SEQ ID |
| | GmCfUmGfGmAmUmCmCmsGmsGm | NO: 394 | GGAUCCGG | NO: 154 |
| ETXS298 | AmsCfsUmUmCmUfCmGfAfGmUmUm | SEQ ID | ACUUCUCGAGUUCUG | SEQ ID |
| | CmUfGmUfUmUmGmUmCmsAmsUm | NO: 395 | UUUGUCAU | NO: 155 |
| ETXS300 | GmsGfsCmGmAmUfCmCfUfUmUmGm | SEQ ID | GGCGAUCCUUUGGUC | SEQ ID |
| | GmUfCmUfGmAmGmAmUmsGmsCm | NO: 396 | UGAGAUGC | NO: 156 |
| ETXS302 | CmsUfsCmUmCmAfUmUfCfAmGmCm | SEQ ID | CUCUCAUUCAGCCGG | SEQ ID |
| | CmGfGmAfAmGmUmUmGmsUmsGm | NO: 397 | AAGUUGUG | NO: 157 |
| ETXS304 | GmsUfsAmCmCmCfAmAfAfAmUmUm | SEQ ID | GUACCCAAAAUUCCU | SEQ ID |
| | CmCfUmCfCmUmGmAmAmsGmsAm | NO: 398 | CCUGAAGA | NO: 158 |
| ETXS306 | CmsCfsUmCmAmGfCmAfAfAmGmUm | SEQ ID | CCUCAGCAAAGUAAU | SEQ ID |
| | AmAfUmAfCmUmCmUmCmsUmsUm | NO: 399 | ACUCUCUU | NO: 159 |
| ETXS308 | UmsCfsAmUmUmCfAmGfCfCmGmGm | SEQ ID | UCAUUCAGCCGGAAG | SEQ ID |
| | AmAfGmUfUmGmUmGmGmsUmsUm | NO: 400 | UUGUGGUU | NO: 160 |
| ETXS310 | GmsAfsUmGmUmUfAmAfGfAmCmGm | SEQ ID | GAUGUUAAGACGCUG | SEQ ID |
| | CmUfGmGfAmUmCmCmGmsGmsCm | NO: 401 | GAUCCGGC | NO: 161 |
| ETXS312 | UmsUfsGmAmAmGfUmAfGfAmUmGm | SEQ ID | UUGAAGUAGAUGCAG | SEQ ID |
| | CmAfGmUfUmGmAmGmAmsAmsUm | NO: 402 | UUGAGAAU | NO: 162 |
| ETXS314 | CmsGfsAmUmCmCfUmUfUfGmGmUm | SEQ ID | CGAUCCUUUGGUCUG | SEQ ID |
| | CmUfGmAfGmAmUmGmCmsCmsUm | NO: 403 | AGAUGCCU | NO: 163 |
| ETXS316 | GmsAfsGmUmUmCfUmGfUfUmUmGm | SEQ ID | GAGUUCUGUUUGUCA | SEQ ID |
| | UmCfAmUfGmCmUmUmUmsUmsUm | NO: 404 | UGCUUUUU | NO: 164 |
| ETXS318 | GmsCfsAmGmGmGfUmCfUfAmUmAm | SEQ ID | GCAGGGUCUAUAUUC | SEQ ID |
| | UmUfCmUfCmCmAmGmAmsGmsCm | NO: 405 | UCCAGAGC | NO: 165 |
| ETXS320 | CmsUfsCmAmGmCfAmAfAfGmUmAm | SEQ ID | CUCAGCAAAGUAAUA | SEQ ID |
| | AmUfAmCfUmCmUmCmUmsUmsAm | NO: 406 | CUCUCUUA | NO: 166 |
| ETXS322 | AmsCfsCmUmCmUfCmUfCfUmCmAm | SEQ ID | ACCUCUCUCUCAUUC | SEQ ID |
| | UmUfCmAfGmCmCmGmGmsAmsAm | NO: 407 | AGCCGGAA | NO: 167 |
| ETXS324 | CmsUfsGmGmGmAfAmUfUfUmAmUm | SEQ ID | CUGGGAAUUUAUUCA | SEQ ID |
| | UmCfAmCfCmCmAmGmGmsAmsUm | NO: 408 | CCCAGGAU | NO: 168 |
| ETXS326 | GmsUfsCmUmCmUfCmCfCfUmUmCm | SEQ ID | GUCUCUCCCUUCAGA | SEQ ID |
| | AmGfAmCfCmUmAmAmGmsGmsAm | NO: 409 | CCUAAGGA | NO: 169 |
| ETXS328 | UmsCfsUmCmUmCfUmCfAfUmUmCm | SEQ ID | UCUCUCUCAUUCAGC | SEQ ID |
| | AmGfCmCfGmGmAmAmGmsUmsUm | NO: 410 | CGGAAGUU | NO: 170 |
| ETXS330 | GmsUfsCmAmUmUfUmCfCfAmCmUm | SEQ ID | GUCAUUUCCACUGGG | SEQ ID |
| | GmGfGmAfAmUmUmUmAmsUmsUm | NO: 411 | AAUUUAUU | NO: 171 |
| ETXS332 | AmsUfsUmCmAmGfCmCfGfGmAmAm | SEQ ID | AUUCAGCCGGAAGUU | SEQ ID |
| | GmUfUmGfUmGmGmUmUmsGmsUm | NO: 412 | GUGGUUGU | NO: 172 |
| ETXS334 | GmsUfsAmGmCmAfGmGfGfUmCmUm | SEQ ID | GUAGCAGGGUCUAUA | SEQ ID |
| | AmUfAmUfUmCmUmCmCmsAmsGm | NO: 413 | UUCUCCAG | NO: 173 |
| ETXS336 | GmsGfsUmGmCmUfUmGfAfAmCmAm | SEQ ID | GGUGCUUGAACAGGU | SEQ ID |
| | GmGfUmCfGmAmUmGmGmsCmsGm | NO: 414 | CGAUGGCG | NO: 174 |
| ETXS338 | UmsGfsAmAmGmUfAmGfAfUmGmCm | SEQ ID | UGAAGUAGAUGCAGU | SEQ ID |
| | AmGfUmUfGmAmGmAmAmsUmsCm | NO: 415 | UGAGAAUC | NO: 175 |
| ETXS340 | UmsGfsAmGmGmAfUmGfUfUmAmAm | SEQ ID | UGAGGAUGUUAAGAC | SEQ ID |
| | GmAfCmGfCmUmGmGmAmsUmsCm | NO: 416 | GCUGGAUC | NO: 176 |
| ETXS342 | AmsUfsCmCmUmUfUmGfGfUmCmUm | SEQ ID | AUCCUUUGGUCUGAG | SEQ ID |
| | GmAfGmAfUmGmCmCmUmsGmsCm | NO: 417 | AUGCCUGC | NO: 177 |
| ETXS344 | CmsGfsGmAmCmUfUmGfGfGmUmGm | SEQ ID | CGGACUUGGGUGGAC | SEQ ID |
| | GmAfCmAfGmCmGmGmCmsAmsUm | NO: 418 | AGCGGCAU | NO: 178 |
| ETXS346 | UmsUfsCmUmCmGfAmGfUfUmCmUm | SEQ ID | UUCUCGAGUUCUGUU | SEQ ID |
| | GmUfUmUfGmUmCmAmUmsGmsCm | NO: 419 | UGUCAUGC | NO: 179 |
| ETXS348 | GmsUfsGmGmAmCfAmGfCfGmGmCm | SEQ ID | GUGGACAGCGGCAUG | SEQ ID |
| | AmUfGmAfAmCmCmCmCmsAmsCm | NO: 420 | AACCCCAC | NO: 180 |
| ETXS350 | AmsGfsGmAmUmGfUmUfAfAmGmAm | SEQ ID | AGGAUGUUAAGACGC | SEQ ID |
| | CmGfCmUfGmGmAmUmCmsCmsGm | NO: 421 | UGGAUCCG | NO: 181 |
| ETXS352 | CmsGfsAmCmAmGfUmGfAfAmGmCm | SEQ ID | CGACAGUGAAGCGGA | SEQ ID |
| | GmGfAmCfUmUmGmGmGmsUmsGm | NO: 422 | CUUGGGUG | NO: 182 |
| ETXS354 | CmsUfsCmUmCmUfCmAfUfUmCmAm | SEQ ID | CUCUCUCAUUCAGCC | SEQ ID |
| | GmCfCmGfGmAmAmGmUmsUmsGm | NO: 423 | GGAAGUUG | NO: 183 |
| ETXS356 | CmsUfsGmGmGmCfCmUfCfAmGmCm | SEQ ID | CUGGGCCUCAGCAAA | SEQ ID |
| | AmAfAmGfUmAmAmUmAmsCmsUm | NO: 424 | GUAAUACU | NO: 184 |
| ETXS358 | AmsGfsCmAmGmGfGmUfCfUmAmUm | SEQ ID | AGCAGGGUCUAUAUU | SEQ ID |
| | AmUfUmCfUmCmCmAmGmsAmsGm | NO: 425 | CUCCAGAG | NO: 185 |
| ETXS360 | AmsGfsUmAmGmAfUmGfCfAmGmUm | SEQ ID | AGUAGAUGCAGUUGA | SEQ ID |
| | UmGfAmGfAmAmUmCmAmsUmsCm | NO: 426 | GAAUCAUC | NO: 186 |
| ETXS362 | GmsGfsAmCmUmUfGmGfGfUmGmGm | SEQ ID | GGACUUGGGUGGACA | SEQ ID |
| | AmCfAmGfCmGmGmCmAmsUmsGm | NO: 427 | GCGGCAUG | NO: 187 |
| ETXS364 | UmsUfsUmGmAmAfGmUfAfGmAmUm | SEQ ID | UUUGAAGUAGAUGCA | SEQ ID |
| | GmCfAmGfUmUmGmAmGmsAmsAm | NO: 428 | GUUGAGAA | NO: 188 |
| ETXS366 | CmsAfsUmUmCmAfGmCfCfGmGmAm | SEQ ID | CAUUCAGCCGGAAGU | SEQ ID |
| | AmGfUmUfGmUmGmGmUmsUmsGm | NO: 429 | UGUGGUUG | NO: 189 |
| ETXS368 | AmsCfsAmGmCmGfGmCfAfUmGmAm | SEQ ID | ACAGCGGCAUGAACC | SEQ ID |
| | AmCfCmCfCmAmCmCmGmsUmsGm | NO: 430 | CCACCGUG | NO: 190 |
| ETXS370 | CmsCfsUmCmUmCfUmCfUfCmAmUm | SEQ ID | CCUCUCUCUCAUUCA | SEQ ID |
| | UmCfAmGfCmCmGmGmAmsAmsGm | NO: 431 | GCCGGAAG | NO: 191 |
| ETXS372 | AmsCfsCmCmAmAfAmAfUfUmCmCm | SEQ ID | ACCCAAAAUUCCUCC | SEQ ID |
| | UmCfCmUfGmAmAmGmAmsGmsGm | NO: 432 | UGAAGAGG | NO: 192 |
| ETXS374 | UmsGfsGmGmCmCfUmCfAfGmCmAm | SEQ ID | UGGGCCUCAGCAAAG | SEQ ID |
| | AmAfGmUfAmAmUmAmCmsUmsCm | NO: 433 | UAAUACUC | NO: 193 |
| ETXS376 | AmsAfsGmUmAmGfAmUfGfCmAmGm | SEQ ID | AAGUAGAUGCAGUUG | SEQ ID |
| | UmUfGmAfGmAmAmUmCmsAmsUm | NO: 434 | AGAAUCAU | NO: 194 |
| ETXS378 | GmsCfsGmAmUmCfCmUfUfUmGmGm | SEQ ID | GCGAUCCUUUGGUCU | SEQ ID |
| | UmCfUmGfAmGmAmUmGmsCmsCm | NO: 435 | GAGAUGCC | NO: 195 |
| ETXS380 | GmsAfsUmCmCmUfUmUfGfGmUmCm | SEQ ID | GAUCCUUUGGUCUGA | SEQ ID |
| | UmGfAmGfAmUmGmCmCmsUmsGm | NO: 436 | GAUGCCUG | NO: 196 |
| ETXS382 | CmsUfsUmUmGmAfAmGfUfAmGmAm | SEQ ID | CUUUGAAGUAGAUGC | SEQ ID |
| | UmGfCmAfGmUmUmGmAmsGmsAm | NO: 437 | AGUUGAGA | NO: 197 |
| ETXS384 | GmsUfsCmGmAmCfAmGfUfGmAmAm | SEQ ID | GUCGACAGUGAAGCG | SEQ ID |
| | GmCfGmGfAmCmUmUmGmsGmsGm | NO: 438 | GACUUGGG | NO: 198 |
| ETXS386 | CmsAfsAmUmUmAfGmCfAfUmGmCm | SEQ ID | CAAUUAGCAUGCUGA | SEQ ID |
| | UmGfAmUfGmCmCmCmCmsCmsCm | NO: 439 | UGCCCCCC | NO: 199 |
| ETXS388 | GmsGfsGmCmCmUfCmAfGfCmAmAm | SEQ ID | GGGCCUCAGCAAAGU | SEQ ID |
| | AmGfUmAfAmUmAmCmUmsCmsUm | NO: 440 | AAUACUCU | NO: 200 |
| ETXS390 | GmsAfsCmAmGmCfGmGfCfAmUmGm | SEQ ID | GACAGCGGCAUGAAC | SEQ ID |
| | AmAfCmCfCmCmAmCmCmsGmsUm | NO: 441 | CCCACCGU | NO: 201 |
| ETXS392 | CmsAfsUmGmAmAfGmAfGfCmAmGm | SEQ ID | CAUGAAGAGCAGGCA | SEQ ID |
| | GmCfAmGfCmUmGmGmUmsGmsCm | NO: 442 | GCUGGUGC | NO: 202 |
| ETXS394 | CmsAfsCmUmGmGfGmAfAfUmUmUm | SEQ ID | CACUGGGAAUUUAUU | SEQ ID |
| | AmUfUmCfAmCmCmCmAmsGmsGm | NO: 443 | CACCCAGG | NO: 203 |
| ETXS396 | UmsUfsCmUmGmUfUmUfGfUmCmAm | SEQ ID | UUCUGUUUGUCAUGC | SEQ ID |
| | UmGfCmUfUmUmUmUmUmsGmsCm | NO: 444 | UUUUUUGC | NO: 204 |
| ETXS398 | UmsCfsGmAmCmAfGmUfGfAmAmGm | SEQ ID | UCGACAGUGAAGCGG | SEQ ID |
| | CmGfGmAfCmUmUmGmGmsGmsUm | NO: 445 | ACUUGGGU | NO: 205 |
| ETXS400 | AmsAfsGmAmCmGfCmUfGfGmAmUm | SEQ ID | AAGACGCUGGAUCCG | SEQ ID |
| | CmCfGmGfCmUmCmUmUmsGmsCm | NO: 446 | GCUCUUGC | NO: 206 |
| ETXS402 | AmsGfsUmUmCmUfGmUfUfUmGmUm | SEQ ID | AGUUCUGUUUGUCAU | SEQ ID |
| | CmAfUmGfCmUmUmUmUmsUmsUm | NO: 447 | GCUUUUUU | NO: 207 |
| ETXS404 | CmsUfsUmGmGmGfUmGfGfAmCmAm | SEQ ID | CUUGGGUGGACAGCG | SEQ ID |
| | GmCfGmGfCmAmUmGmAmsAmsCm | NO: 448 | GCAUGAAC | NO: 208 |
| ETXS406 | UmsCfsGmAmGmUfUmCfUfGmUmUm | SEQ ID | UCGAGUUCUGUUUGU | SEQ ID |
| | UmGfUmCfAmUmGmCmUmsUmsUm | NO: 449 | CAUGCUUU | NO: 209 |
| ETXS408 | GmsCfsCmGmGmAfAmGfUfUmGmUm | SEQ ID | GCCGGAAGUUGUGGU | SEQ ID |
| | GmGfUmUfGmUmGmUmGmsUmsCm | NO: 450 | UGUGUGUC | NO: 210 |
| ETXS410 | CmsAfsGmCmCmGfGmAfAfGmUmUm | SEQ ID | CAGCCGGAAGUUGUG | SEQ ID |
| | GmUfGmGfUmUmGmUmGmsUmsGm | NO: 451 | GUUGUGUG | NO: 211 |
| ETXS412 | UmsAfsAmGmAmCfGmCfUfGmGmAm | SEQ ID | UAAGACGCUGGAUCC | SEQ ID |
| | UmCfCmGfGmCmUmCmUmsUmsGm | NO: 452 | GGCUCUUG | NO: 212 |
| ETXS414 | UmsCfsAmGmCmCfGmGfAfAmGmUm | SEQ ID | UCAGCCGGAAGUUGU | SEQ ID |
| | UmGfUmGfGmUmUmGmUmsGmsUm | NO: 453 | GOUUGUGU | NO: 213 |
| ETXS416 | UmsUfsGmGmUmGfCmUfUfGmAmAm | SEQ ID | UUGGUGCUUGAACAG | SEQ ID |
| | CmAfGmGfUmCmGmAmUmsGmsGm | NO: 454 | GUCGAUGG | NO: 214 |
| ETXS418 | UmsUfsUmUmGmCfCmAfUfCmUmCm | SEQ ID | UUUUGCCAUCUCUCC | SEQ ID |
| | UmCfCmAfCmCmAmCmCmsCmsGm | NO: 455 | ACCACCCG | NO: 215 |
| ETXS420 | GmsAfsCmAmGmUfGmAfAfGmCmGm | SEQ ID | GACAGUGAAGCGGAC | SEQ ID |
| | GmAfCmUfUmGmGmGmUmsGmsGm | NO: 456 | UUGGGUGG | NO: 216 |
| ETXS422 | UmsCfsUmCmGmAfGmUfUfCmUmGm | SEQ ID | UCUCGAGUUCUGUUU | SEQ ID |
| | UmUfUmGIUmCmAmUmGmsCmsUm | NO: 457 | GUCAUGCU | NO: 217 |
| ETXS424 | UmsGfsUmUmAmAfGmAfCfGmCmUm | SEQ ID | UGUUAAGACGCUGGA | SEQ ID |
| | GmGfAmUfCmCmGmGmCmsUmsCm | NO: 458 | UCCGGCUC | NO: 218 |
| ETXS426 | GmsAfsCmGmCmUfGmGfAfUmCmCm | SEQ ID | GACGCUGGAUCCGGC | SEQ ID |
| | GmGfCmUfCmUmUmGmCmsCmsAm | NO: 459 | UCUUGCCA | NO: 219 |
| ETXS428 | AmsCfsGmCmUmGfGmAfUfCmCmGm | SEQ ID | ACGCUGGAUCCGGCU | SEQ ID |
| | GmCfUmCIUmUmGmCmCmsAmsUm | NO: 460 | CUUGCCAU | NO: 220 |
| ETXS430 | UmsGfsGmAmCmAfGmCfGfGmCmAm | SEQ ID | UGGACAGCGGCAUGA | SEQ ID |
| | UmGfAmAfCmCmCmCmAmsCmsCm | NO: 461 | ACCCCACC | NO: 221 |
| ETXS432 | UmsUfsUmCfCmAfCmUfGmGfGmAfA | SEQ ID | UUUCCACUGGGAAUU | SEQ ID |
| | mUfUmUfAmsUfsUm | NO: 462 | UAUU | NO: 222 |
| ETXS434 | GmsAfsUmCfCmUfUmUfGmAfAmGfU | SEQ ID | GAUCCUUUGAAGUAG | SEQ ID |
| | mAfGmAfUmsGfsCm | NO: 463 | AUGC | NO: 223 |
| ETXS436 | AmsUfsCmCfUmUfUmGfAmAfGmUfA | SEQ ID | AUCCUUUGAAGUAGA | SEQ ID |
| | mGfAmUfGmsCfsAm | NO: 464 | UGCA | NO: 224 |
| ETXS438 | AmsCfsUmUfGmUfUmCfAmUfGmGfG | SEQ ID | ACUUGUUCAUGGGUC | SEQ ID |
| | mUfCmUfCmsUfsCm | NO: 465 | UCUC | NO: 225 |
| ETXS440 | UmsCfsCmAfCmUfGmGfGmAfAmUfU | SEQ ID | UCCACUGGGAAUUUA | SEQ ID |
| | mUfAmUfUmsCfsAm | NO: 466 | UUCA | NO: 226 |
| ETXS442 | UmsGfsUmAfCmCfCmAfAmAfAmUfU | SEQ ID | UGUACCCAAAAUUCC | SEQ ID |
| | mCfCmUfCmsCfsUm | NO: 467 | UCCU | NO: 227 |
| ETXS444 | UmsUfsCmCfCmAfUmGfAmAfGmAfG | SEQ ID | UUCCCAUGAAGAGCA | SEQ ID |
| | mCfAmGfGmsCfsAm | NO: 468 | GGCA | NO: 228 |
| ETXS446 | UmsCfsUmUfUmUfAmUfGmAfGmGfC | SEQ ID | UCUUUUAUGAGGOCC | SEQ ID |
| | mCfCmUfUmsGfsGm | NO: 469 | UUGG | NO: 229 |
| ETXS448 | AmsAfsCmUfGmCfUmUfCmUfGmGfA | SEQ ID | AACUGCUUCUGGAUA | SEQ ID |
| | mUfAmUfAmsAfsAm | NO: 470 | UAAA | NO: 230 |
| ETXS450 | CmsCfsUmUfUmGfAmAfGmUfAmGfA | SEQ ID | CCUUUGAAGUAGAUG | SEQ ID |
| | mUfGmCfAmsGfsUm | NO: 471 | CAGU | NO: 231 |
| ETXS452 | UmsUfsAmAfGmAfCmGfCmUfGmGfA | SEQ ID | UUAAGACGCUGGAUC | SEQ ID |
| | mUfCmCfGmsGfsCm | NO: 472 | CGGC | NO: 232 |
| ETXS454 | GmsAfsGmGfAmUfGmUfUmAfAmGfA | SEQ ID | GAGGAUGUUAAGACG | SEQ ID |
| | mCfGmCfUmsGfsGm | NO: 473 | CUGG | NO: 233 |
| ETXS456 | UmsCfsUmGfUmUfUmGfUmCfAmUfG | SEQ ID | UCUGUUUGUCAUGCU | SEQ ID |
| | mCfUmUfUmsUfsUm | NO: 474 | UUUU | NO: 234 |
| ETXS458 | GmsUfsGmUfAmCfCmCfAmAfAmAfU | SEQ ID | GUGUACCCAAAAUUC | SEQ ID |
| | mUfCmCfUmsCfsCm | NO: 475 | CUCC | NO: 235 |
| ETXS460 | UmsUfsCmAfGmCfCmGfGmAfAmGfU | SEQ ID | UUCAGCCGGAAGUUG | SEQ ID |
| | mUfGmUfGmsGfsUm | NO: 476 | UGGU | NO: 236 |
| ETXS462 | UmsGfsUmUfUmGfUmCfAmUfGmCfU | SEQ ID | UGUUUGUCAUGCUUU | SEQ ID |
| | mUfUmUlUmsUfsGm | NO: 477 | UUUG | NO: 237 |
| ETXS464 | AmsUfsUmUfCmCfAmCfUmGfGmGfA | SEQ ID | AUUUCCACUGGGAAU | SEQ ID |
| | mAfUmUfUmsAfsUm | NO: 478 | UUAU | NO: 238 |
| ETXS466 | AmsCfsAmAfUmUfAmGfCmAfUmGfC | SEQ ID | ACAAUUAGCAUGCUG | SEQ ID |
| | mUfGmAfUmsGfsCm | NO: 479 | AUGC | NO: 239 |
| ETXS468 | GmsUfsUmCfUmGfUmUfUmGfUmCfA | SEQ ID | GUUCUGUUUGUCAUG | SEQ ID |
| | mUfGmCfUmsUfsUm | NO: 480 | CUUU | NO: 240 |
| ETXS470 | GmsGfsCmCfUmCfAmGfCmAfAmAfG | SEQ ID | GGCCUCAGCAAAGUA | SEQ ID |
| | mUfAmAfUmsAfsCm | NO: 481 | AUAC | NO: 241 |
| ETXS472 | UmsUfsUmCfCmAfCmUfGfGmGmAmA | SEQ ID | UUUCCACUGGGAAUU | SEQ ID |
| | mUfUmUfAmUmUmCmAmsCmsCm | NO: 482 | UAUUCACC | NO: 122 |
| ETXS474 | GmsAfsUmCfCmUfUmUfGfAmAmGmU | SEQ ID | GAUCCUUUGAAGUAG | SEQ ID |
| | mAfGmAfUmGmCmAmGmsUmsUm | NO: 483 | AUGCAGUU | NO: 123 |
| ETXS476 | AmsUfsCmCfUmUfUmGfAfAmGmUmA | SEQ ID | AUCCUUUGAAGUAGA | SEQ ID |
| | mGfAmUfGmCmAmGmUmsUmsGm | NO: 484 | UGCAGUUG | NO: 124 |
| ETXS478 | AmsCfsUmUfGmUfUmCfAfUmGmGmG | SEQ ID | ACUUGUUCAUGGGUC | SEQ ID |
| | mUfCmUfCmUmCmCmCmsUmsUm | NO: 485 | UCUCCCUU | NO: 125 |
| ETXS480 | UmsCfsCmAfCmUfGmGfGfAmAmUmU | SEQ ID | UCCACUGGGAAUUUA | SEQ ID |
| | mUfAmUfUmCmAmCmCmsCmsAm | NO: 486 | UUCACCCA | NO: 126 |
| ETXS482 | UmsGfsUmAfCmCfCmAfAfAmAmUmU | SEQ ID | UGUACCCAAAAUUCC | SEQ ID |
| | mCfCmUfCmCmUmGmAmsAmsGm | NO: 487 | UCCUGAAG | NO: 127 |
| ETXS484 | UmsUfsCmCfCmAfUmGfAfAmGmAmG | SEQ ID | UUCCCAUGAAGAGCA | SEQ ID |
| | mCfAmGfGmCmAmGmCmsUmsGm | NO: 488 | GGCAGCUG | NO: 128 |
| ETXS486 | UmsCfsUmUfUmUfAmUfGfAmGmGmC | SEQ ID | UCUUUUAUGAGGOCC | SEQ ID |
| | mCfCmUfUmGmGmUmGmsAmsGm | NO: 489 | UUGGUGAG | NO: 129 |
| ETXS488 | AmsAfsCmUfGmCfUmUfCfUmGmGmA | SEQ ID | AACUGCUUCUGGAUA | SEQ ID |
| | mUfAmUfAmAmAmGmGmsUmsCm | NO: 490 | UAAAGGUC | NO: 130 |
| ETXS490 | CmsCfsUmUfUmGfAmAfGfUmAmGmA | SEQ ID | CCUUUGAAGUAGAUG | SEQ ID |
| | mUfGmCfAmGmUmUmGmsAmsGm | NO: 491 | CAGUUGAG | NO: 131 |
| ETXS492 | UmsUfsAmAfGmAfCmGfCfUmGmGmA | SEQ ID | UUAAGACGCUGGAUC | SEQ ID |
| | mUfCmCfGmGmCmUmCmsUmsUm | NO: 492 | CGGCUCUU | NO: 132 |
| ETXS494 | GmsAfsGmGfAmUfGmUfUfAmAmGmA | SEQ ID | GAGGAUGUUAAGACG | SEQ ID |
| | mCfGmCfUmGmGmAmUmsCmsCm | NO: 493 | CUGGAUCC | NO: 133 |
| ETXS496 | UmsCfsUmGfUmUfUmGfUfCmAmUmG | SEQ ID | UCUGUUUGUCAUGCU | SEQ ID |
| | mCfUmUfUmUmUmUmGmsCmsCm | NO: 494 | UUUUUGCC | NO: 134 |
| ETXS498 | GmsUfsGmUfAmCfCmCfAfAmAmAmU | SEQ ID | GUGUACCCAAAAUUC | SEQ ID |
| | mUfCmCfUmCmCmUmGmsAmsAm | NO: 495 | CUCCUGAA | NO: 135 |
| ETXS500 | UmsUfsCmAfGmCfCmGfGfAmAmGmU | SEQ ID | UUCAGCCGGAAGUUG | SEQ ID |
| | mUfGmUfGmGmUmUmGmsUmsGm | NO: 496 | UGGUUGUG | NO: 136 |
| ETXS502 | UmsGfsUmUfUmGfUmCfAfUmGmCmU | SEQ ID | UGUUUGUCAUGCUUU | SEQ ID |
| | mUfUmUfUmUmGmCmCmsAmsUm | NO: 497 | UUUGCCAU | NO: 137 |
| ETXS504 | AmsUfsUmUfCmCfAmCfUfGmGmGmA | SEQ ID | AUUUCCACUGGGAAU | SEQ ID |
| | mAfUmUfUmAmUmUmCmsAmsCm | NO: 498 | UUAUUCAC | NO: 138 |
| ETXS506 | AmsCfsAmAfUmUfAmGfCfAmUmGmC | SEQ ID | ACAAUUAGCAUGCUG | SEQ ID |
| | mUfGmAfUmGmCmCmCmsCmsCm | NO: 499 | AUGCCCCC | NO: 139 |
| ETXS508 | GmsUfsUmCfUmGfUmUfUfGmUmCmA | SEQ ID | GUUCUGUUUGUCAUG | SEQ ID |
| | mUfGmCfUmUmUmUmUmsUmsGm | NO: 500 | CUUUUUUG | NO: 140 |
| ETXS510 | GmsGfsCmCfUmCfAmGfCfAmAmAmG | SEQ ID | GGCCUCAGCAAAGUA | SEQ ID |
| | mUfAmAfUmAmCmUmCmsUmsCm | NO: 501 | AUACUCUC | NO: 141 |
| ETXS512 | UmsUfsUmCfCmAfCmUfGfGmGmAmA | SEQ ID | UUUCCACUGGGAAUU | SEQ ID |
| | mUfUmUfAmUmUmCmAmsCmsCm | NO: 502 | UAUUCACC | NO: 122 |
| ETXS514 | GmsAfsUmCfCmUfUmUfGfAmAmGmU | SEQ ID | GAUCCUUUGAAGUAG | SEQ ID |
| | mAfGmAfUmGmCmAmGmsUmsUm | NO: 503 | AUGCAGUU | NO: 123 |
| ETXS516 | AmsUfsCmCfUmUfUmGfAfAmGmUmA | SEQ ID | AUCCUUUGAAGUAGA | SEQ ID |
| | mGfAmUfGmCmAmGmUmsUmsGm | NO: 504 | UGCAGUUG | NO: 124 |
| ETXS518 | AmsCfsUmUfGmUfUmCfAfUmGmGmG | SEQ ID | ACUUGUUCAUGGGUC | SEQ ID |
| | mUfCmUfCmUmCmCmCmsUmsUm | NO: 505 | UCUCCCUU | NO: 125 |
| ETXS520 | UmsCfsCmAfCmUfGmGfGfAmAmUmU | SEQ ID | UCCACUGGGAAUUUA | SEQ ID |
| | mUfAmUfUmCmAmCmCmsCmsAm | NO: 506 | UUCACCCA | NO: 126 |
| ETXS522 | UmsGfsUmAfCmCfCmAfAfAmAmUmU | SEQ ID | UGUACCCAAAAUUCC | SEQ ID |
| | mCfCmUfCmCmUmGmAmsAmsGm | NO: 507 | UCCUGAAG | NO: 127 |
| ETXS524 | UmsUfsCmCfCmAfUmGfAfAmGmAmG | SEQ ID | UUCCCAUGAAGAGCA | SEQ ID |
| | mCfAmGfGmCmAmGmCmsUmsGm | NO: 508 | GGCAGCUG | NO: 128 |
| ETXS526 | UmsCfsUmUfUmUfAmUfGfAmGmGmC | SEQ ID | UCUUUUAUGAGGOCC | SEQ ID |
| | mCfCmUfUmGmGmUmGmsAmsGm | NO: 509 | UUGGUGAG | NO: 129 |
| ETXS528 | AmsAfsCmUfGmCfUmUfCfUmGmGmA | SEQ ID | AACUGCUUCUGGAUA | SEQ ID |
| | mUfAmUfAmAmAmGmGmsUmsCm | NO: 510 | UAAAGGUC | NO: 130 |
| ETXS530 | CmsCfsUmUfUmGfAmAfGfUmAmGmA | SEQ ID | CCUUUGAAGUAGAUG | SEQ ID |
| | mUfGmCfAmGmUmUmGmsAmsGm | NO: 511 | CAGUUGAG | NO: 131 |
| ETXS532 | UmsUfsAmAfGmAfCmGfCfUmGmGmA | SEQ ID | UUAAGACGCUGGAUC | SEQ ID |
| | mUfCmCfGmGmCmUmCmsUmsUm | NO: 512 | CGGCUCUU | NO: 132 |
| ETXS534 | GmsAfsGmGfAmUfGmUfUfAmAmGmA | SEQ ID | GAGGAUGUUAAGACG | SEQ ID |
| | mCfGmCfUmGmGmAmUmsCmsCm | NO: 513 | CUGGAUCC | NO: 133 |
| ETXS536 | UmsCfsUmGfUmUfUmGfUfCmAmUmG | SEQ ID | UCUGUUUGUCAUGCU | SEQ ID |
| | mCfUmUfUmUmUmUmGmsCmsCm | NO: 514 | UUUUUGCC | NO: 134 |
| ETXS538 | GmsUfsGmUfAmCfCmCfAfAmAmAmU | SEQ ID | GUGUACCCAAAAUUC | SEQ ID |
| | mUfCmCfUmCmCmUmGmsAmsAm | NO: 515 | CUCCUGAA | NO: 135 |
| ETXS540 | UmsUfsCmAfGmCfCmGfGfAmAmGmU | SEQ ID | UUCAGCCGGAAGUUG | SEQ ID |
| | mUfGmUfGmGmUmUmGmsUmsGm | NO: 516 | UGGUUGUG | NO: 136 |
| ETXS542 | UmsGfsUmUfUmGfUmCfAfUmGmCmU | SEQ ID | UGUUUGUCAUGCUUU | SEQ ID |
| | mUfUmUfUmUmGmCmCmsAmsUm | NO: 517 | UUUGCCAU | NO: 137 |
| ETXS544 | AmsUfsUmUfCmCfAmCfUfGmGmGmA | SEQ ID | AUUUCCACUGGGAAU | SEQ ID |
| | mAfUmUfUmAmUmUmCmsAmsCm | NO: 518 | UUAUUCAC | NO: 138 |
| ETXS546 | AmsCfsAmAfUmUfAmGfCfAmUmGmC | SEQ ID | ACAAUUAGCAUGCUG | SEQ ID |
| | mUfGmAfUmGmCmCmCmsCmsCm | NO: 519 | AUGCCCCC | NO: 139 |
| ETXS548 | GmsUfsUmCfUmGfUmUfUfGmUmCmA | SEQ ID | GUUCUGUUUGUCAUG | SEQ ID |
| | mUfGmCfUmUmUmUmUmsUmsGm | NO: 520 | CUUUUUUG | NO: 140 |
| ETXS550 | GmsGfsCmCfUmCfAmGfCfAmAmAmG | SEQ ID | GGCCUCAGCAAAGUA | SEQ ID |
| | mUfAmAfUmAmCmUmCmsUmsCm | NO: 521 | AUACUCUC | NO: 141 |
| ETXS552 | UmsUfsUmCfCmAfCmUfGfGmGmAmA | SEQ ID | UUUCCACUGGGAAUU | SEQ ID |
| | mUfUmUfAmUmUmCmAmsCmsCm | NO: 522 | UAUUCACC | NO: 122 |
| ETXS554 | GmsAfsUmCfCmUfUmUfGfAmAmGmU | SEQ ID | GAUCCUUUGAAGUAG | SEQ ID |
| | mAfGmAfUmGmCmAmGmsUmsUm | NO: 523 | AUGCAGUU | NO: 123 |
| ETXS556 | AmsUfsCmCfUmUfUmGfAfAmGmUmA | SEQ ID | AUCCUUUGAAGUAGA | SEQ ID |
| | mGfAmUfGmCmAmGmUmsUmsGm | NO: 524 | UGCAGUUG | NO: 124 |
| ETXS558 | AmsCfsUmUfGmUfUmCfAfUmGmGmG | SEQ ID | ACUUGUUCAUGGGUC | SEQ ID |
| | mUfCmUfCmUmCmCmCmsUmsUm | NO: 525 | UCUCCCUU | NO: 125 |
| ETXS560 | UmsCfsCmAfCmUfGmGfGfAmAmUmU | SEQ ID | UCCACUGGGAAUUUA | SEQ ID |
| | mUfAmUfUmCmAmCmCmsCmsAm | NO: 526 | UUCACCCA | NO: 126 |
| ETXS562 | UmsGfsUmAfCmCfCmAfAfAmAmUmU | SEQ ID | UGUACCCAAAAUUCC | SEQ ID |
| | mCfCmUfCmCmUmGmAmsAmsGm | NO: 527 | UCCUGAAG | NO: 127 |
| ETXS564 | UmsUfsCmCfCmAfUmGfAfAmGmAmG | SEQ ID | UUCCCAUGAAGAGCA | SEQ ID |
| | mCfAmGfGmCmAmGmCmsUmsGm | NO: 528 | GGCAGCUG | NO: 128 |
| ETXS566 | UmsCfsUmUfUmUfAmUfGfAmGmGmC | SEQ ID | UCUUUUAUGAGGCCC | SEQ ID |
| | mCfCmUfUmGmGmUmGmsAmsGm | NO: 529 | UUGGUGAG | NO: 129 |
| ETXS568 | AmsAfsCmUfGmCfUmUfCfUmGmGmA | SEQ ID | AACUGCUUCUGGAUA | SEQ ID |
| | mUfAmUfAmAmAmGmGmsUmsCm | NO: 530 | UAAAGGUC | NO: 130 |
| ETXS570 | CmsCfsUmUfUmGfAmAfGfUmAmGmA | SEQ ID | CCUUUGAAGUAGAUG | SEQ ID |
| | mUfGmCfAmGmUmUmGmsAmsGm | NO: 531 | CAGUUGAG | NO: 131 |
| ETXS572 | UmsUfsAmAfGmAfCmGfCfUmGmGmA | SEQ ID | UUAAGACGCUGGAUC | SEQ ID |
| | mUfCmCfGmGmCmUmCmsUmsUm | NO: 532 | CGGCUCUU | NO: 132 |
| ETXS574 | GmsAfsGmGfAmUfGmUfUfAmAmGmA | SEQ ID | GAGGAUGUUAAGACG | SEQ ID |
| | mCfGmCfUmGmGmAmUmsCmsCm | NO: 533 | CUGGAUCC | NO: 133 |
| ETXS576 | UmsCfsUmGfUmUfUmGfUfCmAmUmG | SEQ ID | UCUGUUUGUCAUGCU | SEQ ID |
| | mCfUmUfUmUmUmUmGmsCmsCm | NO: 534 | UUUUUGCC | NO: 134 |
| ETXS578 | GmsUfsGmUfAmCfCmCfAfAmAmAmU | SEQ ID | GUGUACCCAAAAUUC | SEQ ID |
| | mUfCmCfUmCmCmUmGmsAmsAm | NO: 535 | CUCCUGAA | NO: 135 |
| ETXS580 | UmsUfsCmAfGmCfCmGfGfAmAmGmU | SEQ ID | UUCAGCCGGAAGUUG | SEQ ID |
| | mUfGmUfGmGmUmUmGmsUmsGm | NO: 536 | UGGUUGUG | NO: 136 |
| ETXS582 | UmsGfsUmUfUmGfUmCfAfUmGmCmU | SEQ ID | UGUUUGUCAUGCUUU | SEQ ID |
| | mUfUmUfUmUmGmCmCmsAmsUm | NO: 537 | UUUGCCAU | NO: 137 |
| ETXS584 | AmsUfsUmUfCmCfAmCfUfGmGmGmA | SEQ ID | AUUUCCACUGGGAAU | SEQ ID |
| | mAfUmUfUmAmUmUmCmsAmsCm | NO: 538 | UUAUUCAC | NO: 138 |
| ETXS586 | AmsCfsAmAfUmUfAmGfCfAmUmGmC | SEQ ID | ACAAUUAGCAUGCUG | SEQ ID |
| | mUfGmAfUmGmCmCmCmsCmsCm | NO: 539 | AUGCCCCC | NO: 139 |
| ETXS588 | GmsUfsUmCfUmGfUmUfUfGmUmCmA | SEQ ID | GUUCUGUUUGUCAUG | SEQ ID |
| | mUfGmCfUmUmUmUmUmsUmsGm | NO: 540 | CUUUUUUG | NO: 140 |
| ETXS590 | GmsGfsCmCfUmCfAmGfCfAmAmAmG | SEQ ID | GGCCUCAGCAAAGUA | SEQ ID |
| | mUfAmAfUmAmCmUmCmsUmsCm | NO: 541 | AUACUCUC | NO: 141 |
| ETXS592 | UmsUfsUmCfCmAfCmUmGmGmGmAm | SEQ ID | UUUCCACUGGGAAUU | SEQ ID |
| | AmUfUmUfAmUmUmCmAmsCmsCm | NO: 542 | UAUUCACC | NO: 122 |
| ETXS594 | GmsAfsUmCfCmUfUmUmGmAmAmGm | SEQ ID | GAUCCUUUGAAGUAG | SEQ ID |
| | UmAfGmAfUmGmCmAmGmsUmsUm | NO: 543 | AUGCAGUU | NO: 123 |
| ETXS596 | AmsUfsCmCfUmUfUmGmAmAmGmUm | SEQ ID | AUCCUUUGAAGUAGA | SEQ ID |
| | AmGfAmUfGmCmAmGmUmsUmsGm | NO: 544 | UGCAGUUG | NO: 124 |
| ETXS598 | AmsCfsUmUfGmUfUmCmAmUmGmGm | SEQ ID | ACUUGUUCAUGGGUC | SEQ ID |
| | GmUfCmUfCmUmCmCmCmsUmsUm | NO: 545 | UCUCCCUU | NO: 125 |
| ETXS600 | UmsCfsCmAfCmUfGmGmGmAmAmUm | SEQ ID | UCCACUGGGAAUUUA | SEQ ID |
| | UmUfAmUfUmCmAmCmCmsCmsAm | NO: 546 | UUCACCCA | NO: 126 |
| ETXS602 | UmsGfsUmAfCmCfCmAmAmAmAmUm | SEQ ID | UGUACCCAAAAUUCC | SEQ ID |
| | UmCfCmUfCmCmUmGmAmsAmsGm | NO: $47 | UCCUGAAG | NO: 127 |
| ETXS604 | UmsUfsCmCfCmAfUmGmAmAmGmAm | SEQ ID | UUCCCAUGAAGAGCA | SEQ ID |
| | GmCfAmGfGmCmAmGmCmsUmsGm | NO: 548 | GGCAGCUG | NO: 128 |
| ETXS606 | UmsCfsUmUfUmUfAmUmGmAmGmG | SEQ ID | UCUUUUAUGAGGOCC | SEQ ID |
| | mCmCfCmUfUmGmGmUmGmsAmsGm | NO: 549 | UUGGUGAG | NO: 129 |
| ETXS608 | AmsAfsCmUfGmCfUmUmCmUmGmGm | SEQ ID | AACUGCUUCUGGAUA | SEQ ID |
| | AmUfAmUfAmAmAmGmGmsUmsCm | NO: 550 | UAAAGGUC | NO: 130 |
| ETXS610 | CmsCfsUmUfUmGfAmAmGmUmAmGm | SEQ ID | CCUUUGAAGUAGAUG | SEQ ID |
| | AmUfGmCfAmGmUmUmGmsAmsGm | NO: 551 | CAGUUGAG | NO: 131 |
| ETXS612 | UmsUfsAmAfGmAfCmGmCmUmGmGm | SEQ ID | UUAAGACGCUGGAUC | SEQ ID |
| | AmUfCmCfGmGmCmUmCmsUmsUm | NO: 552 | CGGCUCUU | NO: 132 |
| ETXS614 | GmsAfsGmGfAmUfGmUmUmAmAmG | SEQ ID | GAGGAUGUUAAGACG | SEQ ID |
| | mAmCfGmCfUmGmGmAmUmsCmsCm | NO: 553 | CUGGAUCC | NO: 133 |
| ETXS616 | UmsCfsUmGfUmUfUmGmUmCmAmUm | SEQ ID | UCUGUUUGUCAUGCU | SEQ ID |
| | GmCfUmUfUmUmUmUmGmsCmsCm | NO: 554 | UUUUUGCC | NO: 134 |
| ETXS618 | GmsUfsGmUfAmCfCmCmAmAmAmAm | SEQ ID | GUGUACCCAAAAUUC | SEQ ID |
| | UmUfCmCfUmCmCmUmGmsAmsAm | NO: 555 | CUCCUGAA | NO: 135 |
| ETXS620 | UmsUfsCmAfGmCfCmGmGmAmAmGm | SEQ ID | UUCAGCCGGAAGUUG | SEQ ID |
| | UmUfGmUfGmGmUmUmGmsUmsGm | NO: 556 | UGGUUGUG | NO: 136 |
| ETXS622 | UmsGfsUmUfUmGfUmCmAmUmGmCm | SEQ ID | UGUUUGUCAUGCUUU | SEQ ID |
| | UmUfUmUlUmUmGmCmCmsAmsUm | NO: 557 | UUUGCCAU | NO: 137 |
| ETXS624 | AmsUfsUmUfCmCfAmCmUmGmGmGm | SEQ ID | AUUUCCACUGGGAAU | SEQ ID |
| | AmAfUmUfUmAmUmUmCmsAmsCm | NO: 558 | UUAUUCAC | NO: 138 |
| ETXS626 | AmsCfsAmAfUmUfAmGmCmAmUmGm | SEQ ID | ACAAUUAGCAUGCUG | SEQ ID |
| | CmUfGmAfUmGmCmCmCmsCmsCm | NO: 559 | AUGCCCCC | NO: 139 |
| ETXS628 | GmsUfsUmCfUmGfUmUmUmGmUmCm | SEQ ID | GUUCUGUUUGUCAUG | SEQ ID |
| | AmUfGmCfUmUmUmUmUmsUmsGm | NO: 560 | CUUUUUUG | NO: 140 |
| ETXS630 | GmsGfsCmCfUmCfAmGmCmAmAmAm | SEQ ID | GGCCUCAGCAAAGUA | SEQ ID |
| | GmUfAmAfUmAmCmUmCmsUmsCm | NO: 561 | AUACUCUC | NO: 141 |
| ETXS632 | UmsUfsCmAfGmCfCmGmGmAmAmGm | SEQ ID | UUCAGCCGGAAGUUG | SEQ ID |
| | UmUfGmUfGmGmUmUmGmsUmsGm | NO: 762 | UGGUUGUG | NO: 136 |
| ETXS634 | UmsUfsCmAmGmCfCmGmGfAmAmGm | SEQ ID | UUCAGCCGGAAGUUG | SEQ ID |
| | UmUfGmUfGmGmUmUmGmsUmsGm | NO: 763 | UGGUUGUG | NO: 136 |
| ETXS638 | GmsUfsUmCmUmGfUmUmUfGmUmCm | SEQ ID | GUUCUGUUUGUCAUG | SEQ ID |
| | AmUfGmCfUmUmUmUmUmsUmsGm | NO: 765 | CUUUUUUG | NO: 140 |
| ETXS640 | UmsAfsCmCfCmAfAmAmAmUmUmCm | SEQ ID | UACCCAAAAUUCCUC | SEQ ID |
| | CmUfCmCfUmGmAmAmGmsAmsGm | NO: 766 | CUGAAGAG | NO: 151 |
| ETXS642 | UmsAfsCmCmCmAfAmAmAfUmUmCm | SEQ ID | UACCCAAAAUUCCUC | SEQ ID |
| | CmUfCmCfUmGmAmAmGmsAmsGm | NO: 767 | CUGAAGAG | NO: 151 |
| ETXS646 | CmsGfsAmGmUmUfCmUmGfUmUmUm | SEQ ID | CGAGUUCUGUUUGUC | SEQ ID |
| | GmUfCmAfUmGmCmUmUmsUmsUm | NO: 769 | AUGCUUUU | NO: 152 |
| ETXS648 | UmsUfsUmGfAmAfGmUmAmGmAmU | SEQ ID | UUUGAAGUAGAUGCA | SEQ ID |
| | mGmCfAmGfUmUmGmAmGmsAmsAm | NO: 770 | GUUGAGAA | NO: 188 |
| ETXS650 | UmsUfsUmGmAmAfGmUmAfGmAmU | SEQ ID | UUUGAAGUAGAUGCA | SEQ ID |
| | mGmCfAmGfUmUmGmAmGmsAmsAm | NO: 771 | GUUGAGAA | NO: 188 |
| ETXS652 | UmsUfsCmAmGmCfCmGmGmAmAmG | SEQ ID | UUCAGCCGGAAGUUG | SEQ ID |
| | mUmUfGmUfGmGfUmUmGmsUmsGm | NO: 782 | UGGUUGUG | NO: 136 |
| ETXS654 | GmsUfsUmCmUmGfUmUmUmGmUmC | SEQ ID | GUUCUGUUUGUCAUG | SEQ ID |
| | mAmUfGmCfUmUfUmUmUmsUmsGm | NO: 783 | CUUUUUUG | NO: 140 |
| ETXS656 | UmsAfsCmCmCmAfAmAmAmUmUmC | SEQ ID | UACCCAAAAUUCCUC | SEQ ID |
| | mCmUfCmCfUmGfAmAmGmsAmsGm | NO: 784 | CUGAAGAG | NO: 151 |
| ETXS658 | CmsGfsAmGmUmUfCmUmGmUmUmU | SEQ ID | CGAGUUCUGUUUGUC | SEQ ID |
| | mGmUfCmAfUmGfCmUmUmsUmsUm | NO: 785 | AUGCUUUU | NO: 152 |
| ETXS660 | UmsUfsUmGmAmAfGmUmAmGmAmU | SEQ ID | UUUGAAGUAGAUGCA | SEQ ID |
| | mGmCfAmGfUmUfGmAmGmsAmsAm | NO: 786 | GUUGAGAA | NO: 188 |
| ETXS2434 | GmsUfsUmCmUmGfUmUmUfGmUmCm | SEQ ID | GUUCUGUUUGUCAUG | SEQ ID |
| | AmUfGmCfUmUmUmUmUmsUmsGm | NO: 789 | CUUUUUUG | NO: 140 |
| ETSX2436 | GmsUfsUmCmUmGfUmUmUmGmUmC | SEQ ID | GUUCUGUUUGUCAUG | SEQ ID |
| | mAmUfGmCfUmUfUmUmUmsUmsGm | NO: 790 | CUUUUUUG | NO: 140 |
| ETXS2438 | GmsUfsUmCmUmGoUmUmUmGmUmC | SEQ ID | GUUCUGUUUGUCAUG | SEQ ID |
| | mAmUfGmCfUmUmUmUmUmsUmsGm | NO: 791 | CUUUUUUG | NO: 140 |
| ETXS2440 | GmsUfsUmCmUmGoUmUfUfGmUmCm | SEQ ID | GUUCUGUUUGUCAUG | SEQ ID |
| | AmUfGmCfUmUmUmUmUmsUmsGm | NO: 792 | CUUUUUUG | NO: 140 |
| ETXS2442 | GmsUfsUmCmUmGfUmUmUmGmUmC | SEQ ID | GUUCUGUUUGUCAUG | SEQ ID |
| | mAmUfGmCfUmUmUmUfUmsUmsGm | NO: 793 | CUUUUUUG | NO: 140 |
| ETXS2444 | GmsUfsUmCfUmGfUmUmUmGmUmCm | SEQ ID | GUUCUGUUUGUCAUG | SEQ ID |
| | AmUfGmCfUmUmUmUmUmsUmsGm | NO: 794 | CUUUUUUG | NO: 140 |
| ETXS2446 | GmsUfsUmCfUmGfUmUfUfGmUmCmA | SEQ ID | GUUCUGUUUGUCAUG | SEQ ID |
| | mUfGmCfUmUmUmUmUmsUmsGm | NO: 795 | CUUUUUUG | NO: 140 |
| ETXS2448 | GmsUfsUmCmUmGfUmUfUfGmUmCm | SEQ ID | GUUCUGUUUGUCAUG | SEQ ID |
| | AmUfGmCfUmUfUmUmUmsUmsGm | NO: 796 | CUUUUUUG | NO: 140 |
| ETXS2450 | GmsUfsUmCmUmGfUmUfUfGmUmCm | SEQ ID | GUUCUGUUUGUCAUG | SEQ ID |
| | AmUfGmCfUmUmUmUfUmsUmsGm | NO: 797 | CUUUUUUG | NO: 140 |
| ETXS2452 | CmsGfsAmGmUmUfCmUmGfUmUmUm | SEQ ID | CGAGUUCUGUUUGUC | SEQ ID |
| | GmUfCmAfUmGmCmUmUmsUmsUm | NO: 798 | AUGCUUUU | NO: 152 |
| ETXS2454 | CmsGfsAmGmUmUfCmUmGmUmUmU | SEQ ID | CGAGUUCUGUUUGUC | SEQ ID |
| | mGmUfCmAfUmGfCmUmUmsUmsUm | NO: 799 | AUGCUUUU | NO: 152 |
| ETXS2456 | CmsGfsAmGmUmUoCmUmGmUmUmU | SEQ ID | CGAGUUCUGUUUGUC | SEQ ID |
| | mGmUfCmAfUmGmCmUmUmsUmsUm | NO: 800 | AUGCUUUU | NO: 152 |
| ETXS2458 | CmsGfsAmGmUmUoCmUfGfUmUmUm | SEQ ID | CGAGUUCUGUUUGUC | SEQ ID |
| | GmUfCmAfUmGmCmUmUmsUmsUm | NO: 801 | AUGCUUUU | NO: 152 |
| ETXS2460 | CmsGfsAmGmUmUfCmUmGmUmUmU | SEQ ID | CGAGUUCUGUUUGUC | SEQ ID |
| | mGmUfCmAfUmGmCmUfUmsUmsUm | NO: 802 | AUGCUUUU | NO: 152 |
| ETXS2462 | CmsGfsAmGfUmUfCmUmGmUmUmUm | SEQ ID | CGAGUUCUGUUUGUC | SEQ ID |
| | GmUfCmAfUmGmCmUmUmsUmsUm | NO: 803 | AUGCUUUU | NO: 152 |
| ETXS2464 | CmsGfsAmGfUmUfCmUfGfUmUmUmG | SEQ ID | CGAGUUCUGUUUGUC | SEQ ID |
| | mUfCmAfUmGmCmUmUmsUmsUm | NO: 804 | AUGCUUUU | NO: 152 |
| ETXS2466 | CmsGfsAmGmUmUfCmUfGfUmUmUm | SEQ ID | CGAGUUCUGUUUGUC | SEQ ID |
| | GmUfCmAfUmGfCmUmUmsUmsUm | NO: 805 | AUGCUUUU | NO: 152 |
| ETXS2468 | CmsGfsAmGmUmUfCmUfGfUmUmUm | SEQ ID | CGAGUUCUGUUUGUC | SEQ ID |
| | GmUfCmAfUmGmCmUfUmsUmsUm | NO: 806 | AUGCUUUU | NO: 152 |

[0831] Table 4 provides the modified second (sense) sequences, together with the corresponding unmodified second (sense) sequences for siRNA oligonucleosides according to the present invention as follows.

TABLE 4

| | | | Underlying Base Sequence | |
|---|---|---|---|---|
| Sense | | SEQ ID | 5′→3′ | SEQ ID |
| strand | Modified Second (Sense) | NO | (Shown as an Unmodified | NO |
| ID | Strand 5′-3′ | (SS-mod) | Nucleoside Sequence) | (SS-unmod) |
| ETXS635 | iaiaAmsAmsAmAmAmGmCfAmUfGfAf | SEQ ID | AAAAAGCAUGACAAA | SEQ ID |
| | CfAmAmAmCmAmGmAmAmCm | NO: 774 | CAGAAC | NO: 260 |
| ETXS643 | iaiaAmsAmsGmCmAmUmGfAmCfAfAf | SEQ ID | AAGCAUGACAAACAG | SEQ ID |
| | AfCmAmGmAmAmCmUmCmGm | NO: 778 | AACUCG | NO: 272 |
| ETXS231 | UmsGmsAmAmUmAmAfAmUfUfCfCm | SEQ ID | UGAAUAAAUUCCCAG | SEQ ID |
| | CmAmGmUmGmGmAmAmAm | NO: 562 | UGGAAA | NO: 242 |
| ETXS233 | CmsUmsGmCmAmUmCfUmAfCfUfUm | SEQ ID | CUGCAUCUACUUCAA | SEQ ID |
| | CmAmAmAmGmGmAmUmCm | NO: 563 | AGGAUC | NO: 243 |
| ETXS235 | AmsCmsUmGmCmAmUfCmUfAfCfUm | SEQ ID | ACUGCAUCUACUUCA | SEQ ID |
| | UmCmAmAmAmGmGmAmUm | NO: 564 | AAGGAU | NO: 244 |
| ETXS237 | GmsGmsGmAmGmAmGfAmCfCfCfAm | SEQ ID | GGGAGAGACCCAUGA | SEQ ID |
| | UmGmAmAmCmAmAmGmUm | NO: 565 | ACAAGU | NO: 245 |
| ETXS239 | GmsGmsUmGmAmAmUfAmAfAfUfUm | SEQ ID | GGUGAAUAAAUUCCC | SEQ ID |
| | CmCmCmAmGmUmGmGmAm | NO: 566 | AGUGGA | NO: 246 |
| ETXS241 | UmsCmsAmGmGmAmGfGmAfAfUfUm | SEQ ID | UCAGGAGGAAUUUUG | SEQ ID |
| | UmUmGmGmGmUmAmCmAm | NO: 567 | GGUACA | NO: 247 |
| ETXS243 | GmsCmsUmGmCmCmUfGmCfUfCfUm | SEQ ID | GCUGCCUGCUCUUCA | SEQ ID |
| | UmCmAmUmGmGmGmAmAm | NO: 568 | UGGGAA | NO: 248 |
| ETXS245 | CmsAmsCmCmAmAmGfGmGfCfCfUm | SEQ ID | CACCAAGGOCCUCAU | SEQ ID |
| | CmAmUmAmAmAmAmGmAm | NO: 569 | AAAAGA | NO: 249 |
| ETXS247 | CmsCmsUmUmUmAmUfAmUfCfCfAm | SEQ ID | CCUUUAUAUCCAGAA | SEQ ID |
| | GmAmAmGmCmAmGmUmUm | NO: 570 | GCAGUU | NO: 250 |
| ETXS249 | CmsAmsAmCmUmGmCfAmUfCfUfAm | SEQ ID | CAACUGCAUCUACUU | SEQ ID |
| | CmUmUmCmAmAmAmGmGm | NO: 571 | CAAAGG | NO: 251 |
| ETXS251 | GmsAmsGmCmCmGmGfAmUfCfCfAm | SEQ ID | GAGCCGGAUCCAGCG | SEQ ID |
| | GmCmGmUmCmUmUmAmAm | NO: 572 | UCUUAA | NO: 252 |
| ETXS253 | AmsUmsCmCmAmGmCfGmUfCfUfUm | SEQ ID | AUCCAGCGUCUUAAC | SEQ ID |
| | AmAmCmAmUmCmCmUmCm | NO: 573 | AUCCUC | NO: 253 |
| ETXS255 | CmsAmsAmAmAmAmAfGmCfAfUfGm | SEQ ID | CAAAAAAGCAUGACA | SEQ ID |
| | AmCmAmAmAmCmAmGmAm | NO: 574 | AACAGA | NO: 254 |
| ETXS257 | CmsAmsGmGmAmGmGfAmAfUfUfUm | SEQ ID | CAGGAGGAAUUUUGG | SEQ ID |
| | UmGmGmGmUmAmCmAmCm | NO: 575 | GUACAC | NO: 255 |
| ETXS259 | CmsAmsAmCmCmAmCfAmAfCfUfUm | SEQ ID | CAACCACAACUUCCG | SEQ ID |
| | CmCmGmGmCmUmGmAmAm | NO: 576 | GCUGAA | NO: 256 |
| ETXS261 | GmsGmsCmAmAmAmAfAmAfGfCfAm | SEQ ID | GGCAAAAAAGCAUGA | SEQ ID |
| | UmGmAmCmAmAmAmCmAm | NO: 577 | CAAACA | NO: 257 |
| ETXS263 | GmsAmsAmUmAmAmAfUmUfCfCfCm | SEQ ID | GAAUAAAUUCCCAGU | SEQ ID |
| | AmGmUmGmGmAmAmAmUm | NO: 578 | GGAAAU | NO: 258 |
| ETXS265 | GmsGmsGmCmAmUmCfAmGfCfAfUm | SEQ ID | GGGCAUCAGCAUGCU | SEQ ID |
| | GmCmUmAmAmUmUmGmUm | NO: 579 | AAUUGU | NO: 259 |
| ETXS267 | AmsAmsAmAmAmGmCfAmUfGfAfCm | SEQ ID | AAAAAGCAUGACAAA | SEQ ID |
| | AmAmAmCmAmGmAmAmCm | NO: 580 | CAGAAC | NO: 260 |
| ETXS269 | GmsAmsGmUmAmUmUfAmCfUfUfUm | SEQ ID | GAGUAUUACUUUGCU | SEQ ID |
| | GmCmUmGmAmGmGmCmCm | NO: 581 | GAGGCC | NO: 261 |
| ETXS271 | UmsCmsCmUmUmAmGfGmUfCfUfGm | SEQ ID | UCCUUAGGUCUGAAG | SEQ ID |
| | AmAmGmGmGmAmGmAmGm | NO: 582 | GGAGAG | NO: 262 |
| ETXS273 | CmsAmsUmCmGmAmCfCmUfGfUfUm | SEQ ID | CAUCGACCUGUUCAA | SEQ ID |
| | CmAmAmGmCmAmCmCmAm | NO: 583 | GCACCA | NO: 263 |
| ETXS275 | UmsCmsAmCmCmAmAfGmGfGfCfCm | SEQ ID | UCACCAAGGGCCUCA | SEQ ID |
| | UmCmAmUmAmAmAmAmGm | NO: 584 | UAAAAG | NO: 264 |
| ETXS277 | AmsAmsUmAmAmAmUfUmCfCfCfAm | SEQ ID | AAUAAAUUCCCAGUG | SEQ ID |
| | GmUmGmGmAmAmAmUmGm | NO: 585 | GAAAUG | NO: 265 |
| ETXS279 | GmsCmsAmAmAmAmAfAmGfCfAfUm | SEQ ID | GCAAAAAAGCAUGAC | SEQ ID |
| | GmAmCmAmAmAmCmAmGm | NO: 586 | AAACAG | NO: 266 |
| ETXS281 | UmsUmsCmCmGmGmCfUmGfAfAfUm | SEQ ID | UUCCGGCUGAAUGAG | SEQ ID |
| | GmAmGmAmGmAmGmAmGm | NO: 587 | AGAGAG | NO: 267 |
| ETXS283 | GmsCmsAmUmGmAmCfAmAfAfCfAm | SEQ ID | GCAUGACAAACAGAA | SEQ ID |
| | GmAmAmCmUmCmGmAmGm | NO: 588 | CUCGAG | NO: 268 |
| ETXS285 | CmsUmsGmCmUmCmUfUmCfAfUfGm | SEQ ID | CUGCUCUUCAUGGGA | SEQ ID |
| | GmGmAmAmGmAmGmUmGm | NO: 589 | AGAGUG | NO: 269 |
| ETXS287 | AmsGmsAmGmUmAmUfUmAfCfUfUm | SEQ ID | AGAGUAUUACUUUGC | SEQ ID |
| | UmGmCmUmGmAmGmGmCm | NO: 590 | UGAGGC | NO: 270 |
| ETXS289 | CmsUmsUmCmAmGmGfAmGfGfAfAm | SEQ ID | CUUCAGGAGGAAUUU | SEQ ID |
| | UmUmUmUmGmGmGmUmAm | NO: 591 | UGGGUA | NO: 271 |
| ETXS291 | AmsAmsGmCmAmUmGfAmCfAfAfAm | SEQ ID | AAGCAUGACAAACAG | SEQ ID |
| | CmAmGmAmAmCmUmCmGm | NO: 592 | AACUCG | NO: 272 |
| ETXS293 | GmsUmsGmAmAmUmAfAmAfUfUfCm | SEQ ID | GUGAAUAAAUUCCCA | SEQ ID |
| | CmCmAmGmUmGmGmAmAm | NO: 593 | GUGGAA | NO: 273 |
| ETXS295 | GmsGmsAmUmCmCmAfGmCfGfUfCm | SEQ ID | GGAUCCAGCGUCUUA | SEQ ID |
| | UmUmAmAmCmAmUmCmCm | NO: 594 | ACAUCC | NO: 274 |
| ETXS297 | GmsAmsCmAmAmAmCfAmGfAfAfCm | SEQ ID | GACAAACAGAACUCG | SEQ ID |
| | UmCmGmAmGmAmAmGmUm | NO: 595 | AGAAGU | NO: 275 |
| ETXS299 | AmsUmsCmUmCmAmGfAmCfCfAfAm | SEQ ID | AUCUCAGACCAAAGG | SEQ ID |
| | AmGmGmAmUmCmGmCmCm | NO: 596 | AUCGCC | NO: 276 |
| ETXS301 | CmsAmsAmCmUmUmCfCmGfGfCfUm | SEQ ID | CAACUUCCGGCUGAA | SEQ ID |
| | GmAmAmUmGmAmGmAmGm | NO: 597 | UGAGAG | NO: 277 |
| ETXS303 | UmsUmsCmAmGmGmAfGmGfAfAfUm | SEQ ID | UUCAGGAGGAAUUUU | SEQ ID |
| | UmUmUmGmGmGmUmAmCm | NO: 598 | GGGUAC | NO: 278 |
| ETXS305 | GmsAmsGmAmGmUmAfUmUfAfCfUm | SEQ ID | GAGAGUAUUACUUUG | SEQ ID |
| | UmUmGmCmUmGmAmGmGm | NO: 599 | CUGAGG | NO: 279 |
| ETXS307 | CmsCmsAmCmAmAmCfUmUfCfCfGm | SEQ ID | CCACAACUUCCGGCU | SEQ ID |
| | GmCmUmGmAmAmUmGmAm | NO: 600 | GAAUGA | NO: 280 |
| ETXS309 | CmsGmsGmAmUmCmCfAmGfCfGfUm | SEQ ID | CGGAUCCAGCGUCUU | SEQ ID |
| | CmUmUmAmAmCmAmUmCm | NO: 601 | AACAUC | NO: 281 |
| ETXS311 | UmsCmsUmCmAmAmCfUmGfCfAfUm | SEQ ID | UCUCAACUGCAUCUA | SEQ ID |
| | CmUmAmCmUmUmCmAmAm | NO: 602 | CUUCAA | NO: 282 |
| ETXS313 | GmsCmsAmUmCmUmCfAmGfAfCfCm | SEQ ID | GCAUCUCAGACCAAA | SEQ ID |
| | AmAmAmGmGmAmUmCmGm | NO: 603 | GGAUCG | NO: 283 |
| ETXS315 | AmsAmsAmGmCmAmUfGmAfCfAfAm | SEQ ID | AAAGCAUGACAAACA | SEQ ID |
| | AmCmAmGmAmAmCmUmCm | NO: 604 | GAACUC | NO: 284 |
| ETXS317 | UmsCmsUmGmGmAmGfAmAfUfAfUm | SEQ ID | UCUGGAGAAUAUAGA | SEQ ID |
| | AmGmAmCmCmCmUmGmCm | NO: 605 | CCCUGC | NO: 285 |
| ETXS319 | AmsGmsAmGmAmGmUfAmUfUfAfCm | SEQ ID | AGAGAGUAUUACUUU | SEQ ID |
| | UmUmUmGmCmUmGmAmGm | NO: 606 | GCUGAG | NO: 286 |
| ETXS321 | CmsCmsGmGmCmUmGfAmAfUfGfAm | SEQ ID | CCGGCUGAAUGAGAG | SEQ ID |
| | GmAmGmAmGmAmGmGmUm | NO: 607 | AGAGGU | NO: 287 |
| ETXS323 | CmsCmsUmGmGmGmUfGmAfAfUfAm | SEQ ID | CCUGGGUGAAUAAAU | SEQ ID |
| | AmAmUmUmCmCmCmAmGm | NO: 608 | UCCCAG | NO: 288 |
| ETXS325 | CmsUmsUmAmGmGmUfCmUfGfAfAm | SEQ ID | CUUAGGUCUGAAGGG | SEQ ID |
| | GmGmGmAmGmAmGmAmCm | NO: 609 | AGAGAC | NO: 289 |
| ETXS327 | CmsUmsUmCmCmGmGfCmUfGfAfAm | SEQ ID | CUUCCGGCUGAAUGA | SEQ ID |
| | UmGmAmGmAmGmAmGmAm | NO: 610 | GAGAGA | NO: 290 |
| ETXS329 | UmsAmsAmAmUmUmCfCmCfAfGfUm | SEQ ID | UAAAUUCCCAGUGGA | SEQ ID |
| | GmGmAmAmAmUmGmAmCm | NO: 611 | AAUGAC | NO: 291 |
| ETXS331 | AmsAmsCmCmAmCmAfAmCfUfUfCm | SEQ ID | AACCACAACUUCCGG | SEQ ID |
| | CmGmGmCmUmGmAmAmUm | NO: 612 | CUGAAU | NO: 292 |
| ETXS333 | GmsGmsAmGmAmAmUfAmUfAfGfAm | SEQ ID | GGAGAAUAUAGACCC | SEQ ID |
| | CmCmCmUmGmCmUmAmCm | NO: 613 | UGCUAC | NO: 293 |
| ETXS335 | CmsCmsAmUmCmGmAfCmCfUfGfUm | SEQ ID | CCAUCGACCUGUUCA | SEQ ID |
| | UmCmAmAmGmCmAmCmCm | NO: 614 | AGCACC | NO: 294 |
| ETXS337 | UmsUmsCmUmCmAmAfCmUfGfCfAm | SEQ ID | UUCUCAACUGCAUCU | SEQ ID |
| | UmCmUmAmCmUmUmCmAm | NO: 615 | ACUUCA | NO: 295 |
| ETXS339 | UmsCmsCmAmGmCmGfUmCfUfUfAm | SEQ ID | UCCAGCGUCUUAACA | SEQ ID |
| | AmCmAmUmCmCmUmCmAm | NO: 616 | UCCUCA | NO: 296 |
| ETXS341 | AmsGmsGmCmAmUmCfUmCfAfGfAm | SEQ ID | AGGCAUCUCAGACCA | SEQ ID |
| | CmCmAmAmAmGmGmAmUm | NO: 617 | AAGGAU | NO: 297 |
| ETXS343 | GmsCmsCmGmCmUmGfUmCfCfAfCmC | SEQ ID | GCCGCUGUCCACCCA | SEQ ID |
| | mCmAmAmGmUmCmCmGm | NO: 618 | AGUCCG | NO: 298 |
| ETXS345 | AmsUmsGmAmCmAmAfAmCfAfGfAm | SEQ ID | AUGACAAACAGAACU | SEQ ID |
| | AmCmUmCmGmAmGmAmAm | NO: 619 | CGAGAA | NO: 299 |
| ETXS347 | GmsGmsGmGmUmUmCfAmUfGfCfCm | SEQ ID | GGGGUUCAUGCCGCU | SEQ ID |
| | GmCmUmGmUmCmCmAmCm | NO: 620 | GUCCAC | NO: 300 |
| ETXS349 | GmsAmsUmCmCmAmGfCmGfUfCfUm | SEQ ID | GAUCCAGCGUCUUAA | SEQ ID |
| | UmAmAmCmAmUmCmCmUm | NO: 621 | CAUCCU | NO: 301 |
| ETXS351 | CmsCmsCmAmAmGmUfCmCfGfCfUm | SEQ ID | CCCAAGUCCGCUUCA | SEQ ID |
| | UmCmAmCmUmGmUmCmGm | NO: 622 | CUGUCG | NO: 302 |
| ETXS353 | AmsCmsUmUmCmCmGfGmCfUfGfAm | SEQ ID | ACUUCCGGCUGAAUG | SEQ ID |
| | AmUmGmAmGmAmGmAmGm | NO: 623 | AGAGAG | NO: 303 |
| ETXS355 | UmsAmsUmUmAmCmUfUmUfGfCfUm | SEQ ID | UAUUACUUUGCUGAG | SEQ ID |
| | GmAmGmGmCmCmCmAmGm | NO: 624 | GCCCAG | NO: 304 |
| ETXS357 | CmsUmsGmGmAmGmAfAmUfAfUfAm | SEQ ID | CUGGAGAAUAUAGAC | SEQ ID |
| | GmAmCmCmCmUmGmCmUm | NO: 625 | CCUGCU | NO: 305 |
| ETXS359 | UmsGmsAmUmUmCmUfCmAfAfCfUm | SEQ ID | UGAUUCUCAACUGCA | SEQ ID |
| | GmCmAmUmCmUmAmCmUm | NO: 626 | UCUACU | NO: 306 |
| ETXS361 | UmsGmsCmCmGmCmUfGmUfCfCfAm | SEQ ID | UGCCGCUGUCCACCC | SEQ ID |
| | CmCmCmAmAmGmUmCmCm | NO: 627 | AAGUCC | NO: 307 |
| ETXS363 | CmsUmsCmAmAmCmUfGmCfAfUfCm | SEQ ID | CUCAACUGCAUCUAC | SEQ ID |
| | UmAmCmUmUmCmAmAmAm | NO: 628 | UUCAAA | NO: 308 |
| ETXS365 | AmsCmsCmAmCmAmAfCmUfUfCfCm | SEQ ID | ACCACAACUUCCGGC | SEQ ID |
| | GmGmCmUmGmAmAmUmGm | NO: 629 | UGAAUG | NO: 309 |
| ETXS367 | CmsGmsGmUmGmGmGfGmUfUfCfAm | SEQ ID | CGGUGGGGUUCAUGC | SEQ ID |
| | UmGmCmCmGmCmUmGmUm | NO: 630 | CGCUGU | NO: 310 |
| ETXS369 | UmsCmsCmGmGmCmUfGmAfAfUfGm | SEQ ID | UCCGGCUGAAUGAGA | SEQ ID |
| | AmGmAmGmAmGmAmGmGm | NO: 631 | GAGAGG | NO: 311 |
| ETXS371 | UmsCmsUmUmCmAmGfGmAfGfGfAm | SEQ ID | UCUUCAGGAGGAAUU | SEQ ID |
| | AmUmUmUmUmGmGmGmUm | NO: 632 | UUGGGU | NO: 312 |
| ETXS373 | GmsUmsAmUmUmAmCfUmUfUfGfCm | SEQ ID | GUAUUACUUUGCUGA | SEQ ID |
| | UmGmAmGmGmCmCmCmAm | NO: 633 | GGCCCA | NO: 313 |
| ETXS375 | GmsAmsUmUmCmUmCfAmAfCfUfGm | SEQ ID | GAUUCUCAACUGCAU | SEQ ID |
| | CmAmUmCmUmAmCmUmUm | NO: 634 | CUACUU | NO: 314 |
| ETXS377 | CmsAmsUmCmUmCmAfGmAfCfCfAm | SEQ ID | CAUCUCAGACCAAAG | SEQ ID |
| | AmAmGmGmAmUmCmGmCm | NO: 635 | GAUCGC | NO: 315 |
| ETXS379 | GmsGmsCmAmUmCmUfCmAfGfAfCm | SEQ ID | GGCAUCUCAGACCAA | SEQ ID |
| | CmAmAmAmGmGmAmUmCm | NO: 636 | AGGAUC | NO: 316 |
| ETXS381 | UmsCmsAmAmCmUmGfCmAfUfCfUm | SEQ ID | UCAACUGCAUCUACU | SEQ ID |
| | AmCmUmUmCmAmAmAmGm | NO: 637 | UCAAAG | NO: 317 |
| ETXS383 | CmsAmsAmGmUmCmCfGmCfUfUfCm | SEQ ID | CAAGUCCGCUUCACU | SEQ ID |
| | AmCmUmGmUmCmGmAmCm | NO: 638 | GUCGAC | NO: 318 |
| ETXS385 | GmsGmsGmGmCmAmUfCmAfGfCfAm | SEQ ID | GGGGCAUCAGCAUGC | SEQ ID |
| | UmGmCmUmAmAmUmUmGm | NO: 639 | UAAUUG | NO: 319 |
| ETXS387 | AmsGmsUmAmUmUmAfCmUfUfUfGm | SEQ ID | AGUAUUACUUUGCUG | SEQ ID |
| | CmUmGmAmGmGmCmCmCm | NO: 640 | AGGCCC | NO: 320 |
| ETXS389 | GmsGmsUmGmGmGmGfUmUfCfAfUm | SEQ ID | GGUGGGGUUCAUGCC | SEQ ID |
| | GmCmCmGmCmUmGmUmCm | NO: 641 | GCUGUC | NO: 321 |
| ETXS391 | AmsCmsCmAmGmCmUfGmCfCfUfGm | SEQ ID | ACCAGCUGCCUGCUC | SEQ ID |
| | CmUmCmUmUmCmAmUmGm | NO: 642 | UUCAUG | NO: 322 |
| ETXS393 | UmsGmsGmGmUmGmAfAmUfAfAfAm | SEQ ID | UGGGUGAAUAAAUUC | SEQ ID |
| | UmUmCmCmCmAmGmUmGm | NO: 643 | CCAGUG | NO: 323 |
| ETXS395 | AmsAmsAmAmAmAmGfCmAfUfGfAm | SEQ ID | AAAAAAGCAUGACAA | SEQ ID |
| | CmAmAmAmCmAmGmAmAm | NO: 644 | ACAGAA | NO: 324 |
| ETXS397 | CmsCmsAmAmGmUmCfCmGfCfUfUm | SEQ ID | CCAAGUCCGCUUCAC | SEQ ID |
| | CmAmCmUmGmUmCmGmAm | NO: 645 | UGUCGA | NO: 325 |
| ETXS399 | AmsAmsGmAmGmCmCfGmGfAfUfCm | SEQ ID | AAGAGCCGGAUCCAG | SEQ ID |
| | CmAmGmCmGmUmCmUmUm | NO: 646 | CGUCUU | NO: 326 |
| ETXS401 | AmsAmsAmAmGmCmAfUmGfAfCfAm | SEQ ID | AAAAGCAUGACAAAC | SEQ ID |
| | AmAmCmAmGmAmAmCmUm | NO: 647 | AGAACU | NO: 327 |
| ETXS403 | UmsCmsAmUmGmCmCfGmCfUfGfUm | SEQ ID | UCAUGCCGCUGUCCA | SEQ ID |
| | CmCmAmCmCmCmAmAmGm | NO: 648 | CCCAAG | NO: 328 |
| ETXS405 | AmsGmsCmAmUmGmAfCmAfAfAfCm | SEQ ID | AGCAUGACAAACAGA | SEQ ID |
| | AmGmAmAmCmUmCmGmAm | NO: 649 | ACUCGA | NO: 329 |
| ETXS407 | CmsAmsCmAmCmAmAfCmCfAfCfAm | SEQ ID | CACACAACCACAACU | SEQ ID |
| | AmCmUmUmCmCmGmGmCm | NO: 650 | UCCGGC | NO: 330 |
| ETXS409 | CmsAmsCmAmAmCmCfAmCfAfAfCm | SEQ ID | CACAACCACAACUUC | SEQ ID |
| | UmUmCmCmGmGmCmUmGm | NO: 651 | CGGCUG | NO: 331 |
| ETXS411 | AmsGmsAmGmCmCmGfGmAfUfCfCm | SEQ ID | AGAGCCGGAUCCAGC | SEQ ID |
| | AmGmCmGmUmCmUmUmAm | NO: 652 | GUCUUA | NO: 332 |
| ETXS413 | AmsCmsAmAmCmCmAfCmAfAfCfUm | SEQ ID | ACAACCACAACUUCC | SEQ ID |
| | UmCmCmGmGmCmUmGmAm | NO: 653 | GGCUGA | NO: 333 |
| ETXS415 | AmsUmsCmGmAmCmCfUmGfUfUfCm | SEQ ID | AUCGACCUGUUCAAG | SEQ ID |
| | AmAmGmCmAmCmCmAmAm | NO: 654 | CACCAA | NO: 334 |
| ETXS417 | GmsGmsUmGmGmUmGfGmAfGfAfGm | SEQ ID | GGUGGUGGAGAGAUG | SEQ ID |
| | AmUmGmGmCmAmAmAmAm | NO: 655 | GCAAAA | NO: 335 |
| ETXS419 | AmsCmsCmCmAmAmGfUmCfCfGfCm | SEQ ID | ACCCAAGUCCGCUUC | SEQ ID |
| | UmUmCmAmCmUmGmUmCm | NO: 656 | ACUGUC | NO: 336 |
| ETXS421 | CmsAmsUmGmAmCmAfAmAfCfAfGm | SEQ ID | CAUGACAAACAGAAC | SEQ ID |
| | AmAmCmUmCmGmAmGmAm | NO: 657 | UCGAGA | NO: 337 |
| ETXS423 | GmsCmsCmGmGmAmUfCmCfAfGfCm | SEQ ID | GCCGGAUCCAGCGUC | SEQ ID |
| | GmUmCmUmUmAmAmCmAm | NO: 658 | UUAACA | NO: 338 |
| ETXS425 | GmsCmsAmAmGmAmGfCmCfGfGfAm | SEQ ID | GCAAGAGCCGGAUCC | SEQ ID |
| | UmCmCmAmGmCmGmUmCm | NO: 659 | AGCGUC | NO: 339 |
| ETXS427 | GmsGmsCmAmAmGmAfGmCfCfGfGm | SEQ ID | GGCAAGAGCCGGAUC | SEQ ID |
| | AmUmCmCmAmGmCmGmUm | NO: 660 | CAGCGU | NO: 340 |
| ETXS429 | UmsGmsGmGmGmUmUfCmAfUfGfCm | SEQ ID | UGGGGUUCAUGCCGC | SEQ ID |
| | CmGmCmUmGmUmCmCmAm | NO: 661 | UGUCCA | NO: 341 |
| ETXS431 | AfsAmsUfAmAfAmUfUmCfCmCfAmGf | SEQ ID | AAUAAAUUCCCAGUG | SEQ ID |
| | UmGfGmAfAmAf | NO: 662 | GAAA | NO: 342 |
| ETXS433 | GfsCmsAfUmCfUmAfCmUfUmCfAmAf | SEQ ID | GCAUCUACUUCAAAG | SEQ ID |
| | AmGfGmAfUmCf | NO: 663 | GAUC | NO: 343 |
| ETXS435 | UfsGmsCfAmUfCmUfAmCfUmUfCmAf | SEQ ID | UGCAUCUACUUCAAA | SEQ ID |
| | AmAfGmGfAmUf | NO: 664 | GGAU | NO: 344 |
| ETXS437 | GfsAmsGfAmGfAmCfCmCfAmUfGmAf | SEQ ID | GAGAGACCCAUGAAC | SEQ ID |
| | AmCfAmAfGmUf | NO: 665 | AAGU | NO: 345 |
| ETXS439 | UfsGmsAfAmUfAmAfAmUfUmCfCmCf | SEQ ID | UGAAUAAAUUCCCAG | SEQ ID |
| | AmGfUmGfGmAf | NO: 666 | UGGA | NO: 346 |
| ETXS441 | AfsGmsGfAmGfGmAfAmUfUmUfUmGf | SEQ ID | AGGAGGAAUUUUGGG | SEQ ID |
| | GmGfUmAfCmAf | NO: 667 | UACA | NO: 347 |
| ETXS443 | UfsGmsCfCmUfGmCfUmCfUmUfCmAf | SEQ ID | UGCCUGCUCUUCAUG | SEQ ID |
| | UmGfGmGfAmAf | NO: 668 | GGAA | NO: 348 |
| ETXS445 | CfsCmsAfAmGfGmGfCmCfUmCfAmUf | SEQ ID | CCAAGGGCCUCAUAA | SEQ ID |
| | AmAfAmAfGmAf | NO: 669 | AAGA | NO: 349 |
| ETXS447 | UfsUmsUfAmUfAmUfCmCfAmGfAmAf | SEQ ID | UUUAUAUCCAGAAGC | SEQ ID |
| | GmCfAmGfUmUf | NO: 670 | AGUU | NO: 350 |
| ETXS449 | AfsCmsUfGmCfAmUfCmUfAmCfUmUf | SEQ ID | ACUGCAUCUACUUCA | SEQ ID |
| | CmAfAmAfGmGf | NO: 671 | AAGG | NO: 351 |
| ETXS451 | GfsCmsCfGmGfAmUfCmCfAmGfCmGf | SEQ ID | GCCGGAUCCAGCGUC | SEQ ID |
| | UmCfUmUfAmAf | NO: 672 | UUAA | NO: 352 |
| ETXS453 | CfsCmsAfGmCfGmUfCmUfUmAfAmCf | SEQ ID | CCAGCGUCUUAACAU | SEQ ID |
| | AmUfCmCfUmCf | NO: 673 | CCUC | NO: 353 |
| ETXS455 | AfsAmsAfAmAfGmCfAmUfGmAfCmAf | SEQ ID | AAAAAGCAUGACAAA | SEQ ID |
| | AmAfCmAfGmAf | NO: 674 | CAGA | NO: 354 |
| ETXS457 | GfsGmsAfGmGfAmAfUmUfUmUfGmGf | SEQ ID | GGAGGAAUUUUGGGU | SEQ ID |
| | GmUfAmCfAmCf | NO: 675 | ACAC | NO: 355 |
| ETXS459 | AfsCmsCfAmCfAmAfCmUfUmCfCmGf | SEQ ID | ACCACAACUUCCGGC | SEQ ID |
| | GmCfUmGfAmAf | NO: 676 | UGAA | NO: 356 |
| ETXS461 | CfsAmsAfAmAfAmAfGmCfAmUfGmAf | SEQ ID | CAAAAAAGCAUGACA | SEQ ID |
| | CmAfAmAfCmAf | NO: 677 | AACA | NO: 357 |
| ETXS463 | AfsUmsAfAmAfUmUfCmCfCmAfGmUf | SEQ ID | AUAAAUUCCCAGUGG | SEQ ID |
| | GmGfAmAfAmUf | NO: 678 | AAAU | NO: 358 |
| ETXS465 | GfsCmsAfUmCfAmGfCmAfUmGfCmUf | SEQ ID | GCAUCAGCAUGCUAA | SEQ ID |
| | AmAfUmUfGmUf | NO: 679 | UUGU | NO: 359 |
| ETXS467 | AfsAmsAfGmCfAmUfGmAfCmAfAmAf | SEQ ID | AAAGCAUGACAAACA | SEQ ID |
| | CmAfGmAfAmCf | NO: 680 | GAAC | NO: 360 |
| ETXS469 | GfsUmsAfUmUfAmCfUmUfUmGfCmUf | SEQ ID | GUAUUACUUUGCUGA | SEQ ID |
| | GmAfGmGfCmCf | NO: 681 | GGCC | NO: 361 |
| ETXS471 | UmsGmsAmAmUmAmAfAfUfUfCfCmC | SEQ ID | UGAAUAAAUUCCCAG | SEQ ID |
| | mAmGmUmGmGmAfAmAm | NO: 682 | UGGAAA | NO: 242 |
| ETXS473 | CmsUmsGmCmAmUmCfUfAfCfUfUmC | SEQ ID | CUGCAUCUACUUCAA | SEQ ID |
| | mAmAmAmGmGmAfUmCm | NO: 683 | AGGAUC | NO: 243 |
| ETXS475 | AmsCmsUmGmCmAmUfCfUfAfCfUmU | SEQ ID | ACUGCAUCUACUUCA | SEQ ID |
| | mCmAmAmAmGmGfAmUm | NO: 684 | AAGGAU | NO: 244 |
| ETXS477 | GmsGmsGmAmGmAmGfAfCfCfCfAmU | SEQ ID | GGGAGAGACCCAUGA | SEQ ID |
| | mGmAmAmCmAmAfGmUm | NO: 685 | ACAAGU | NO: 245 |
| ETXS479 | GmsGmsUmGmAmAmUfAfAfAfUfUmC | SEQ ID | GGUGAAUAAAUUCCC | SEQ ID |
| | mCmCmAmGmUmGfGmAm | NO: 686 | AGUGGA | NO: 246 |
| ETXS481 | UmsCmsAmGmGmAmGfGfAfAfUfUmU | SEQ ID | UCAGGAGGAAUUUUG | SEQ ID |
| | mUmGmGmGmUmAfCmAm | NO: 687 | GGUACA | NO: 247 |
| ETXS483 | GmsCmsUmGmCmCmUfGfCfUfCfUmU | SEQ ID | GCUGCCUGCUCUUCA | SEQ ID |
| | mCmAmUmGmGmGfAmAm | NO: 688 | UGGGAA | NO: 248 |
| ETXS485 | CmsAmsCmCmAmAmGfGfGfCfCfUmC | SEQ ID | CACCAAGGGCCUCAU | SEQ ID |
| | mAmUmAmAmAmAfGmAm | NO: 689 | AAAAGA | NO: 249 |
| ETXS487 | CmsCmsUmUmUmAmUfAfUfCfCfAmG | SEQ ID | CCUUUAUAUCCAGAA | SEQ ID |
| | mAmAmGmCmAmGfUmUm | NO: 690 | GCAGUU | NO: 250 |
| ETXS489 | CmsAmsAmCmUmGmCfAfUfCfUfAmC | SEQ ID | CAACUGCAUCUACUU | SEQ ID |
| | mUmUmCmAmAmAfGmGm | NO: 691 | CAAAGG | NO: 251 |
| ETXS491 | GmsAmsGmCmCmGmGfAfUfCfCfAmG | SEQ ID | GAGCCGGAUCCAGCG | SEQ ID |
| | mCmGmUmCmUmUfAmAm | NO: 692 | UCUUAA | NO: 252 |
| ETXS493 | AmsUmsCmCmAmGmCfGfUfCfUfUmA | SEQ ID | AUCCAGCGUCUUAAC | SEQ ID |
| | mAmCmAmUmCmCfUmCm | NO: 693 | AUCCUC | NO: 253 |
| ETXS495 | CmsAmsAmAmAmAmAfGfCfAfUfGmA | SEQ ID | CAAAAAAGCAUGACA | SEQ ID |
| | mCmAmAmAmCmAfGmAm | NO: 694 | AACAGA | NO: 254 |
| ETXS497 | CmsAmsGmGmAmGmGfAfAfUfUfUmU | SEQ ID | CAGGAGGAAUUUUGG | SEQ ID |
| | mGmGmGmUmAmCfAmCm | NO: 695 | GUACAC | NO: 255 |
| ETXS499 | CmsAmsAmCmCmAmCfAfAfCfUfUmC | SEQ ID | CAACCACAACUUCCG | SEQ ID |
| | mCmGmGmCmUmGfAmAm | NO: 696 | GCUGAA | NO: 256 |
| ETXS501 | GmsGmsCmAmAmAmAfAfAfGfCfAmU | SEQ ID | GGCAAAAAAGCAUGA | SEQ ID |
| | mGmAmCmAmAmAfCmAm | NO: 697 | CAAACA | NO: 257 |
| ETXS503 | GmsAmsAmUmAmAmAfUfUfCfCfCmA | SEQ ID | GAAUAAAUUCCCAGU | SEQ ID |
| | mGmUmGmGmAmAfAmUm | NO: 698 | GGAAAU | NO: 258 |
| ETXS505 | GmsGmsGmCmAmUmCfAfGfCfAfUmG | SEQ ID | GGGCAUCAGCAUGCU | SEQ ID |
| | mCmUmAmAmUmUfGmUm | NO: 699 | AAUUGU | NO: 259 |
| ETXS507 | AmsAmsAmAmAmGmCfAfUfGfAfCmA | SEQ ID | AAAAAGCAUGACAAA | SEQ ID |
| | mAmAmCmAmGmAfAmCm | NO: 700 | CAGAAC | NO: 260 |
| ETXS509 | GmsAmsGmUmAmUmUfAfCfUfUfUmG | SEQ ID | GAGUAUUACUUUGCU | SEQ ID |
| | mCmUmGmAmGmGfCmCm | NO: 701 | GAGGCC | NO: 261 |
| ETXS511 | UmsGmsAmAmUmAfAfAmUfUfCfCfC | SEQ ID | UGAAUAAAUUCCCAG | SEQ ID |
| | mAmGmUmGmGmAmAmAm | NO: 702 | UGGAAA | NO: 242 |
| ETXS513 | CmsUmsGmCmAmUfCfUmAfCfUfUfCm | SEQ ID | CUGCAUCUACUUCAA | SEQ ID |
| | AmAmAmGmGmAmUmCm | NO: 703 | AGGAUC | NO: 243 |
| ETXS515 | AmsCmsUmGmCmAfUfCmUfAfCfUfU | SEQ D | ACUGCAUCUACUUCA | SEQ ID |
| | mCmAmAmAmGmGmAmUm | NO: 704 | AAGGAU | NO: 244 |
| ETXS517 | GmsGmsGmAmGmAfGfAmCfCfCfAfU | SEQ ID | GGGAGAGACCCAUGA | SEQ ID |
| | mGmAmAmCmAmAmGmUm | NO: 705 | ACAAGU | NO: 245 |
| ETXS519 | GmsGmsUmGmAmAfUfAmAfAfUfUfC | SEQ ID | GGUGAAUAAAUUCCC | SEQ ID |
| | mCmCmAmGmUmGmGmAm | NO: 706 | AGUGGA | NO: 246 |
| ETXS521 | UmsCmsAmGmGmAfGfGmAfAfUfUfU | SEQ ID | UCAGGAGGAAUUUUG | SEQ ID |
| | mUmGmGmGmUmAmCmAm | NO: 707 | GGUACA | NO: 247 |
| ETXS523 | GmsCmsUmGmCmCfUfGmCfUfCfUfUm | SEQ ID | GCUGCCUGCUCUUCA | SEQ ID |
| | CmAmUmGmGmGmAmAm | NO: 708 | UGGGAA | NO: 248 |
| ETXS525 | CmsAmsCmCmAmAfGfGmGfCfCfUfCm | SEQ ID | CACCAAGGGCCUCAU | SEQ ID |
| | AmUmAmAmAmAmGmAm | NO: 709 | AAAAGA | NO: 249 |
| ETXS527 | CmsCmsUmUmUmAfUfAmUfCfCfAfG | SEQ ID | CCUUUAUAUCCAGAA | SEQ ID |
| | mAmAmGmCmAmGmUmUm | NO: 710 | GCAGUU | NO: 250 |
| ETXS529 | CmsAmsAmCmUmGfCfAmUfCfUfAfCm | SEQ ID | CAACUGCAUCUACUU | SEQ ID |
| | UmUmCmAmAmAmGmGm | NO: 711 | CAAAGG | NO: 251 |
| ETXS531 | GmsAmsGmCmCmGfGfAmUfCfCfAfG | SEQ ID | GAGCCGGAUCCAGCG | SEQ ID |
| | mCmGmUmCmUmUmAmAm | NO: 712 | UCUUAA | NO: 252 |
| ETXS533 | AmsUmsCmCmAmGfCfGmUfCfUfUfA | SEQ ID | AUCCAGCGUCUUAAC | SEQ ID |
| | mAmCmAmUmCmCmUmCm | NO: 713 | AUCCUC | NO: 253 |
| ETXS535 | CmsAmsAmAmAmAfAfGmCfAfUfGfA | SEQ ID | CAAAAAAGCAUGACA | SEQ ID |
| | mCmAmAmAmCmAmGmAm | NO: 714 | AACAGA | NO: 254 |
| ETXS537 | CmsAmsGmGmAmGfGfAmAfUfUfUfU | SEQ ID | CAGGAGGAAUUUUGG | SEQ ID |
| | mGmGmGmUmAmCmAmCm | NO: 715 | GUACAC | NO: 255 |
| ETXS539 | CmsAmsAmCmCmAfCfAmAfCfUfUfCm | SEQ ID | CAACCACAACUUCCG | SEQ ID |
| | CmGmGmCmUmGmAmAm | NO: 716 | GCUGAA | NO: 256 |
| ETXS541 | GmsGmsCmAmAmAfAfAmAfGfCfAfU | SEQ ID | GGCAAAAAAGCAUGA | SEQ ID |
| | mGmAmCmAmAmAmCmAm | NO: 717 | CAAACA | NO: 257 |
| ETXS543 | GmsAmsAmUmAmAfAfUmUfCfCfCfA | SEQ ID | GAAUAAAUUCCCAGU | SEQ ID |
| | mGmUmGmGmAmAmAmUm | NO: 718 | GGAAAU | NO: 258 |
| ETXS545 | GmsGmsGmCmAmUfCfAmGfCfAfUfG | SEQ ID | GGGCAUCAGCAUGCU | SEQ ID |
| | mCmUmAmAmUmUmGmUm | NO: 719 | AAUUGU | NO: 259 |
| ETXS547 | AmsAmsAmAmAmGfCfAmUfGfAfCfA | SEQ ID | AAAAAGCAUGACAAA | SEQ ID |
| | mAmAmCmAmGmAmAmCm | NO: 720 | CAGAAC | NO: 260 |
| ETXS549 | GmsAmsGmUmAmUfUfAmCfUfUfUfG | SEQ ID | GAGUAUUACUUUGCU | SEQ ID |
| | mCmUmGmAmGmGmCmCm | NO: 721 | GAGGCC | NO: 261 |
| ETXS551 | UmsGmsAmAmUmAmAfAmUfUfCfCfC | SEQ ID | UGAAUAAAUUCCCAG | SEQ ID |
| | mAmGmUmGmGmAmAmAm | NO: 722 | UGGAAA | NO: 242 |
| ETXS553 | CmsUmsGmCmAmUmCfUmAfCfUfUfC | SEQ ID | CUGCAUCUACUUCAA | SEQ ID |
| | mAmAmAmGmGmAmUmCm | NO: 723 | AGGAUC | NO: 243 |
| ETXS555 | AmsCmsUmGmCmAmUfCmUfAfCfUfU | SEQ ID | ACUGCAUCUACUUCA | SEQ ID |
| | mCmAmAmAmGmGmAmUm | NO: 724 | AAGGAU | NO: 244 |
| ETXS557 | GmsGmsGmAmGmAmGfAmCfCfCfAfU | SEQ ID | GGGAGAGACCCAUGA | SEQ ID |
| | mGmAmAmCmAmAmGmUm | NO: 725 | ACAAGU | NO: 245 |
| ETXS559 | GmsGmsUmGmAmAmUfAmAfAfUfUfC | SEQ ID | GGUGAAUAAAUUCCC | SEQ ID |
| | mCmCmAmGmUmGmGmAm | NO: 726 | AGUGGA | NO: 246 |
| ETXS561 | UmsCmsAmGmGmAmGfGmAfAfUfUfU | SEQ ID | UCAGGAGGAAUUUUG | SEQ ID |
| | mUmGmGmGmUmAmCmAm | NO: 727 | GGUACA | NO: 247 |
| ETXS563 | GmsCmsUmGmCmCmUfGmCfUfCfUfU | SEQ ID | GCUGCCUGCUCUUCA | SEQ ID |
| | mCmAmUmGmGmGmAmAm | NO: 728 | UGGGAA | NO: 248 |
| ETXS565 | CmsAmsCmCmAmAmGfGmGfCfCfUfC | SEQ ID | CACCAAGGGCCUCAU | SEQ ID |
| | mAmUmAmAmAmAmGmAm | NO: 729 | AAAAGA | NO: 249 |
| ETXS567 | CmsCmsUmUmUmAmUfAmUfCfCfAfG | SEQ ID | CCUUUAUAUCCAGAA | SEQ ID |
| | mAmAmGmCmAmGmUmUm | NO: 730 | GCAGUU | NO: 250 |
| ETXS569 | CmsAmsAmCmUmGmCfAmUfCfUfAfC | SEQ ID | CAACUGCAUCUACUU | SEQ ID |
| | mUmUmCmAmAmAmGmGm | NO: 731 | CAAAGG | NO: 251 |
| ETXS571 | GmsAmsGmCmCmGmGfAmUfCfCfAfG | SEQ ID | GAGCCGGAUCCAGCG | SEQ ID |
| | mCmGmUmCmUmUmAmAm | NO: 732 | UCUUAA | NO: 252 |
| ETXS573 | AmsUmsCmCmAmGmCfGmUfCfUfUfA | SEQ ID | AUCCAGCGUCUUAAC | SEQ ID |
| | mAmCmAmUmCmCmUmCm | NO: 733 | AUCCUC | NO: 253 |
| ETXS575 | CmsAmsAmAmAmAmAfGmCfAfUfGIA | SEQ ID | CAAAAAAGCAUGACA | SEQ ID |
| | mCmAmAmAmCmAmGmAm | NO: 734 | AACAGA | NO: 254 |
| ETXS577 | CmsAmsGmGmAmGmGfAmAfUfUfUfU | SEQ ID | CAGGAGGAAUUUUGG | SEQ ID |
| | mGmGmGmUmAmCmAmCm | NO: 735 | GUACAC | NO: 255 |
| ETXS579 | CmsAmsAmCmCmAmCfAmAfCfUfUfC | SEQ ID | CAACCACAACUUCCG | SEQ ID |
| | mCmGmGmCmUmGmAmAm | NO: 736 | GCUGAA | NO: 256 |
| ETXS581 | GmsGmsCmAmAmAmAfAmAfGfCfAfU | SEQ ID | GGCAAAAAAGCAUGA | SEQ ID |
| | mGmAmCmAmAmAmCmAm | NO: 737 | CAAACA | NO: 257 |
| ETXS583 | GmsAmsAmUmAmAmAfUmUfCfCfCfA | SEQ ID | GAAUAAAUUCCCAGU | SEQ ID |
| | mGroUmGmGmAmAmAmUm | NO: 738 | GGAAAU | NO: 258 |
| ETXS585 | GmsGmsGmCmAmUmCfAmGfCfAfUfG | SEQ ID | GGGCAUCAGCAUGCU | SEQ ID |
| | mCmUmAmAmUmUmGmUm | NO: 739 | AAUUGU | NO: 259 |
| ETXS587 | AmsAmsAmAmAmGmCfAmUfGfAfCfA | SEQ ID | AAAAAGCAUGACAAA | SEQ ID |
| | mAmAmCmAmGmAmAmCm | NO: 740 | CAGAAC | NO: 260 |
| ETXS589 | GmsAmsGmUmAmUmUfAmCfUfUfUfG | SEQ ID | GAGUAUUACUUUGCU | SEQ ID |
| | mCmUmGmAmGmGmCmCm | NO: 741 | GAGGCC | NO: 261 |
| ETXS591 | UmsGmsAmAmUmAmAfAmUfUfCfCfC | SEQ ID | UGAAUAAAUUCCCAG | SEQ ID |
| | mAmGmUmGmGmAmAmAm | NO: 742 | UGGAAA | NO: 242 |
| ETXS593 | CmsUmsGmCmAmUmCfUmAfCfUfUfC | SEQ ID | CUGCAUCUACUUCAA | SEQ ID |
| | mAmAmAmGmGmAmUmCm | NO: 743 | AGGAUC | NO: 243 |
| ETXS595 | AmsCmsUmGmCmAmUfCmUfAfCfUfU | SEQ ID | ACUGCAUCUACUUCA | SEQ ID |
| | mCmAmAmAmGmGmAmUm | NO: 744 | AAGGAU | NO: 244 |
| ETXS597 | GmsGmsGmAmGmAmGfAmCfCfCfAfU | SEQ ID | GGGAGAGACCCAUGA | SEQ ID |
| | mGmAmAmCmAmAmGmUm | NO: 745 | ACAAGU | NO: 245 |
| ETXS599 | GmsGmsUmGmAmAmUfAmAfAfUfUfC | SEQ ID | GGUGAAUAAAUUCCC | SEQ ID |
| | mCmCmAmGmUmGmGmAm | NO: 746 | AGUGGA | NO: 246 |
| ETXS601 | UmsCmsAmGmGmAmGfGmAfAfUfUfU | SEQ ID | UCAGGAGGAAUUUUG | SEQ ID |
| | mUmGmGmGmUmAmCmAm | NO: 747 | GGUACA | NO: 247 |
| ETXS603 | GmsCmsUmGmCmCmUfGmCfUfCfUfU | SEQ ID | GCUGCCUGCUCUUCA | SEQ ID |
| | mCmAmUmGmGmGmAmAm | NO: 748 | UGGGAA | NO: 248 |
| ETXS605 | CmsAmsCmCmAmAmGfGmGfCfCfUfC | SEQ ID | CACCAAGGGCCUCAU | SEQ ID |
| | mAmUmAmAmAmAmGmAm | NO: 749 | AAAAGA | NO: 249 |
| ETXS607 | CmsCmsUmUmUmAmUfAmUfCfCfAfG | SEQ ID | CCUUUAUAUCCAGAA | SEQ ID |
| | mAmAmGmCmAmGmUmUm | NO: 750 | GCAGUU | NO: 250 |
| ETXS609 | CmsAmsAmCmUmGmCfAmUfCfUfAfC | SEQ ID | CAACUGCAUCUACUU | SEQ ID |
| | mUmUmCmAmAmAmGmGm | NO: 751 | CAAAGG | NO: 251 |
| ETXS611 | GmsAmsGmCmCmGmGfAmUfCfCfAfG | SEQ ID | GAGCCGGAUCCAGCG | SEQ ID |
| | mCmGmUmCmUmUmAmAm | NO: 752 | UCUUAA | NO: 252 |
| ETXS613 | AmsUmsCmCmAmGmCfGmUfCfUfUfA | SEQ ID | AUCCAGOGUCUUAAC | SEQ ID |
| | mAmCmAmUmCmCmUmCm | NO: 753 | AUCCUC | NO: 253 |
| ETXS615 | CmsAmsAmAmAmAmAfGmCfAfUfGIA | SEQ ID | CAAAAAAGCAUGACA | SEQ ID |
| | mCmAmAmAmCmAmGmAm | NO: 754 | AACAGA | NO: 254 |
| ETXS617 | CmsAmsGmGmAmGmGfAmAfUfUfUfU | SEQ ID | CAGGAGGAAUUUUGG | SEQ ID |
| | mGmGmGmUmAmCmAmCm | NO: 755 | GUACAC | NO: 255 |
| ETXS619 | CmsAmsAmCmCmAmCfAmAfCfUfUfC | SEQ ID | CAACCACAACUUCCG | SEQ ID |
| | mCmGmGmCmUmGmAmAm | NO: 756 | GCUGAA | NO: 256 |
| ETXS621 | GmsGmsCmAmAmAmAfAmAfGfCfAfU | SEQ ID | GGCAAAAAAGCAUGA | SEQ ID |
| | mGmAmCmAmAmAmCmAm | NO: 757 | CAAACA | NO: 257 |
| ETXS623 | GmsAmsAmUmAmAmAfUmUfCfCfCfA | SEQ ID | GAAUAAAUUCCCAGU | SEQ ID |
| | mGmUmGmGmAmAmAmUm | NO: 758 | GGAAAU | NO: 258 |
| ETXS625 | GmsGmsGmCmAmUmCfAmGfCfAfUfG | SEQ ID | GGGCAUCAGCAUGCU | SEQ ID |
| | mCmUmAmAmUmUmGmUm | NO: 759 | AAUUGU | NO: 259 |
| ETXS627 | AmsAmsAmAmAmGmCfAmUfGfAfCfA | SEQ ID | AAAAAGCAUGACAAA | SEQ ID |
| | mAmAmCmAmGmAmAmCm | NO: 760 | CAGAAC | NO: 260 |
| ETXS629 | GmsAmsGmUmAmUmUfAmCfUfUfUfG | SEQ ID | GAGUAUUACUUUGCU | SEQ ID |
| | mCmUmGmAmGmGmCmCm | NO: 761 | GAGGCC | NO: 261 |
| ETXS631 | iaiaCmsAmsAmCmCmAmCfAmAfCfUf | SEQ ID | CAACCACAACUUCCG | SEQ ID |
| | UfCmCmGmGmCmUmGmAmAm | NO: 772 | GCUGAA | NO: 256 |
| ETXS633 | iaiaCmsAmsAmCmCmAmCmAmAfCfUf | SEQ ID | CAACCACAACUUCCG | SEQ ID |
| | UmCmCmGmGmCmUmGmAmAm | NO: 773 | GCUGAA | NO: 256 |
| ETXS637 | iaiaAmsAmsAmAmAmGmCmAmUfGfAf | SEQ ID | AAAAAGCAUGACAAA | SEQ ID |
| | CmAmAmAmCmAmGmAmAmCm | NO: 775 | CAGAAC | NO: 260 |
| ETXS639 | iaiaCmsUmsUmCmAmGmGfAmGfGfAf | SEQ ID | CUUCAGGAGGAAUUU | SEQ ID |
| | AfUmUmUmUmGmGmGmUmAm | NO: 776 | UGGGUA | NO: 271 |
| ETXS641 | iaiaCmsUmsUmCmAmGmGmAmGfGfAf | SEQ ID | CUUCAGGAGGAAUUU | SEQ ID |
| | AmUmUmUmUmGmGmGmUmAm | NO: 777 | UGGGUA | NO: 271 |
| ETXS645 | iaiaAmsAmsGmCmAmUmGmAmCfAfAf | SEQ ID | AAGCAUGACAAACAG | SEQ ID |
| | AmCmAmGmAmAmCmUmCmGm | NO: 779 | AACUCG | NO: 272 |
| ETXS647 | iaiaCmsUmsCmAmAmCmUfGmCfAfUf | SEQ ID | CUCAACUGCAUCUAC | SEQ ID |
| | CfUmAmCmUmUmCmAmAmAm | NO: 780 | UUCAAA | NO: 308 |
| ETXS649 | iaiaCmsUmsCmAmAmCmUmGmCfAfUf | SEQ ID | CUCAACUGCAUCUAC | SEQ ID |
| | CmUmAmCmUmUmCmAmAmAm | NO: 781 | UUCAAA | NO: 308 |
| ETXS2433 | iaiaAmsAmsAmAmAmGmCmAmUfGfAf | SEQ ID | AAAAAGCAUGACAAA | SEQ ID |
| | CmAmAmAmCmAmGmAmAmCm | NO: 807 | CAGAAC | NO: 260 |
| ETXS2435 | iaiaAmsAmsGmCmAmUmGmAmCfAfAf | SEQ ID | AAGCAUGACAAACAG | SEQ ID |
| | AmCmAmGmAmAmCmUmCmGm | NO: 808 | AACUCG | NO: 272 |

[0832] Some of the modified second strand sequences as illustrated above in Table 4 include the preferred 5′ iaia motif. However, it should also be understood that the scope of these modified second strand sequences additionally includes the Me/F modified second strand in the absence of the 5′iaia motif.

[0833] Table 5 identifies duplexes with Duplex IDs referencing the modified antisense and sense IDs from previous Tables 3 and 4.

TABLE 5

| | First (Antisense) | Second (Sense) |
|---|---|---|
| Duplex ID | strand ID | strand ID |
| ETXM1176 | ETXS636 | ETXS635 |
| ETXM1136 | ETXS644 | ETXS643 |
| ETXM116 | ETXS232 | ETXS231 |
| ETXM117 | ETXS234 | ETXS233 |
| ETXM118 | ETXS236 | ETXS235 |
| ETXM119 | ETXS238 | ETXS237 |
| ETXM120 | ETXS240 | ETXS239 |
| ETXM121 | ETXS242 | ETXS241 |
| ETXM122 | ETXS244 | ETXS243 |
| ETXM123 | ETXS246 | ETXS245 |
| ETXM124 | ETXS248 | ETXS247 |
| ETXM125 | ETXS250 | ETXS249 |
| ETXM126 | ETXS252 | ETXS251 |
| ETXM127 | ETXS254 | ETXS253 |
| ETXM128 | ETXS256 | ETXS255 |
| ETXM129 | ETXS258 | ETXS257 |
| ETXM130 | ETXS260 | ETXS259 |
| ETXM131 | ETXS262 | ETXS261 |
| ETXM132 | ETXS264 | ETXS263 |
| ETXM133 | ETXS266 | ETXS265 |
| ETXM134 | ETXS268 | ETXS267 |
| ETXM135 | ETXS270 | ETXS269 |
| ETXM136 | ETXS272 | ETXS271 |
| ETXM137 | ETXS274 | ETXS273 |
| ETXM138 | ETXS276 | ETXS275 |
| ETXM139 | ETXS278 | ETXS277 |
| ETXM140 | ETXS280 | ETXS279 |
| ETXM141 | ETXS282 | ETXS281 |
| ETXM142 | ETXS284 | ETXS283 |
| ETXM143 | ETXS286 | ETXS285 |
| ETXM144 | ETXS288 | ETXS287 |
| ETXM145 | ETXS290 | ETXS289 |
| ETXM146 | ETXS292 | ETXS291 |
| ETXM147 | ETXS294 | ETXS293 |
| ETXM148 | ETXS296 | ETXS295 |
| ETXM149 | ETXS298 | ETXS297 |
| ETXM150 | ETXS300 | ETXS299 |
| ETXM151 | ETXS302 | ETXS301 |
| ETXM152 | ETXS304 | ETXS303 |
| ETXM153 | ETXS306 | ETXS305 |
| ETXM154 | ETXS308 | ETXS307 |
| ETXM155 | ETXS310 | ETXS309 |
| ETXM156 | ETXS312 | ETXS311 |
| ETXM157 | ETXS314 | ETXS313 |
| ETXM158 | ETXS316 | ETXS315 |
| ETXM159 | ETXS318 | ETXS317 |
| ETXM160 | ETXS320 | ETXS319 |
| ETXM161 | ETXS322 | ETXS321 |
| ETXM162 | ETXS324 | ETXS323 |
| ETXM163 | ETXS326 | ETXS325 |
| ETXM164 | ETXS328 | ETXS327 |
| ETXM165 | ETXS330 | ETXS329 |
| ETXM166 | ETXS332 | ETXS331 |
| ETXM167 | ETXS334 | ETXS333 |
| ETXM168 | ETXS336 | ETXS335 |
| ETXM169 | ETXS338 | ETXS337 |
| ETXM170 | ETXS340 | ETXS339 |
| ETXM171 | ETXS342 | ETXS341 |
| ETXM172 | ETXS344 | ETXS343 |
| ETXM173 | ETXS346 | ETXS345 |
| ETXM174 | ETXS348 | ETXS347 |
| ETXM175 | ETXS350 | ETXS349 |
| ETXM176 | ETXS352 | ETXS351 |
| ETXM177 | ETXS354 | ETXS353 |
| ETXM178 | ETXS356 | ETXS355 |
| ETXM179 | ETXS358 | ETXS357 |
| ETXM180 | ETXS360 | ETXS359 |
| ETXM181 | ETXS362 | ETXS361 |
| ETXM182 | ETXS364 | ETXS363 |
| ETXM183 | ETXS366 | ETXS365 |
| ETXM184 | ETXS368 | ETXS367 |
| ETXM185 | ETXS370 | ETXS369 |
| ETXM186 | ETXS372 | ETXS371 |
| ETXM187 | ETXS374 | ETXS373 |
| ETXM188 | ETXS376 | ETXS375 |
| ETXM189 | ETXS378 | ETXS377 |
| ETXM190 | ETXS380 | ETXS379 |
| ETXM191 | ETXS382 | ETXS381 |
| ETXM192 | ETXS384 | ETXS383 |
| ETXM193 | ETXS386 | ETXS385 |
| ETXM194 | ETXS388 | ETXS387 |
| ETXM195 | ETXS390 | ETXS389 |
| ETXM196 | ETXS392 | ETXS391 |
| ETXM197 | ETXS394 | ETXS393 |
| ETXM198 | ETXS396 | ETXS395 |
| ETXM199 | ETXS398 | ETXS397 |
| ETXM200 | ETXS400 | ETXS399 |
| ETXM201 | ETXS402 | ETXS401 |
| ETXM202 | ETXS404 | ETXS403 |
| ETXM203 | ETXS406 | ETXS405 |
| ETXM204 | ETXS408 | ETXS407 |
| ETXM205 | ETXS410 | ETXS409 |
| ETXM206 | ETXS412 | ETXS411 |
| ETXM207 | ETXS414 | ETXS413 |
| ETXM208 | ETXS416 | ETXS415 |
| ETXM209 | ETXS418 | ETXS417 |
| ETXM210 | ETXS420 | ETXS419 |
| ETXM211 | ETXS422 | ETXS421 |
| ETXM212 | ETXS424 | ETXS423 |
| ETXM213 | ETXS426 | ETXS425 |
| ETXM214 | ETXS428 | ETXS427 |
| ETXM215 | ETXS430 | ETXS429 |
| ETXM216 | ETXS432 | ETXS431 |
| ETXM217 | ETXS434 | ETXS433 |
| ETXM218 | ETXS436 | ETXS435 |
| ETXM219 | ETXS438 | ETXS437 |
| ETXM220 | ETXS440 | ETXS439 |
| ETXM221 | ETXS442 | ETXS441 |
| ETXM222 | ETXS444 | ETXS443 |
| ETXM223 | ETXS446 | ETXS445 |
| ETXM224 | ETXS448 | ETXS447 |
| ETXM225 | ETXS450 | ETXS449 |
| ETXM226 | ETXS452 | ETXS451 |
| ETXM227 | ETXS454 | ETXS453 |
| ETXM228 | ETXS456 | ETXS455 |
| ETXM229 | ETXS458 | ETXS457 |
| ETXM230 | ETXS460 | ETXS459 |
| ETXM231 | ETXS462 | ETXS461 |
| ETXM232 | ETXS464 | ETXS463 |
| ETXM233 | ETXS466 | ETXS465 |
| ETXM234 | ETXS468 | ETXS467 |
| ETXM235 | ETXS470 | ETXS469 |
| ETXM236 | ETXS472 | ETXS471 |
| ETXM237 | ETXS474 | ETXS473 |
| ETXM238 | ETXS476 | ETXS475 |
| ETXM239 | ETXS478 | ETXS477 |
| ETXM240 | ETXS480 | ETXS479 |
| ETXM241 | ETXS482 | ETXS481 |
| ETXM242 | ETXS484 | ETXS483 |
| ETXM243 | ETXS486 | ETXS485 |
| ETXM244 | ETXS488 | ETXS487 |
| ETXM245 | ETXS490 | ETXS489 |
| ETXM246 | ETXS492 | ETXS491 |
| ETXM247 | ETXS494 | ETXS493 |
| ETXM248 | ETXS496 | ETXS495 |
| ETXM249 | ETXS498 | ETXS497 |
| ETXM250 | ETXS500 | ETXS499 |
| ETXM251 | ETXS502 | ETXS501 |
| ETXM252 | ETXS504 | ETXS503 |
| ETXM253 | ETXS506 | ETXS505 |
| ETXM254 | ETXS508 | ETXS507 |
| ETXM255 | ETXS510 | ETXS509 |
| ETXM256 | ETXS512 | ETXS511 |
| ETXM257 | ETXS514 | ETXS513 |
| ETXM258 | ETXS516 | ETXS515 |
| ETXM259 | ETXS518 | ETXS517 |
| ETXM260 | ETXS520 | ETXS519 |
| ETXM261 | ETXS522 | ETXS521 |
| ETXM262 | ETXS524 | ETXS523 |
| ETXM263 | ETXS526 | ETXS525 |
| ETXM264 | ETXS528 | ETXS527 |
| ETXM265 | ETXS530 | ETXS529 |
| ETXM266 | ETXS532 | ETXS531 |
| ETXM267 | ETXS534 | ETXS533 |
| ETXM268 | ETXS536 | ETXS535 |
| ETXM269 | ETXS538 | ETXS537 |
| ETXM270 | ETXS540 | ETXS539 |
| ETXM271 | ETXS542 | ETXS541 |
| ETXM272 | ETXS544 | ETXS543 |
| ETXM273 | ETXS546 | ETXS545 |
| ETXM274 | ETXS548 | ETXS547 |
| ETXM275 | ETXS550 | ETXS549 |
| ETXM276 | ETXS552 | ETXS551 |
| ETXM277 | ETXS554 | ETXS553 |
| ETXM278 | ETXS556 | ETXS555 |
| ETXM279 | ETXS558 | ETXS557 |
| ETXM280 | ETXS560 | ETXS559 |
| ETXM281 | ETXS562 | ETXS561 |
| ETXM282 | ETXS564 | ETXS563 |
| ETXM283 | ETXS566 | ETXS565 |
| ETXM284 | ETXS568 | ETXS567 |
| ETXM285 | ETXS570 | ETXS569 |
| ETXM286 | ETXS572 | ETXS571 |
| ETXM287 | ETXS574 | ETXS573 |
| ETXM288 | ETXS576 | ETXS575 |
| ETXM289 | ETXS578 | ETXS577 |
| ETXM290 | ETXS580 | ETXS579 |
| ETXM291 | ETXS582 | ETXS581 |
| ETXM292 | ETXS584 | ETXS583 |
| ETXM293 | ETXS586 | ETXS585 |
| ETXM294 | ETXS588 | ETXS587 |
| ETXM295 | ETXS590 | ETXS589 |
| ETXM296 | ETXS592 | ETXS591 |
| ETXM297 | ETXS594 | ETXS593 |
| ETXM298 | ETXS596 | ETXS595 |
| ETXM299 | ETXS598 | ETXS597 |
| ETXM300 | ETXS600 | ETXS599 |
| ETXM301 | ETXS602 | ETXS601 |
| ETXM302 | ETXS604 | ETXS603 |
| ETXM303 | ETXS606 | ETXS605 |
| ETXM304 | ETXS608 | ETXS607 |
| ETXM305 | ETXS610 | ETXS609 |
| ETXM306 | ETXS612 | ETXS611 |
| ETXM307 | ETXS614 | ETXS613 |
| ETXM308 | ETXS616 | ETXS615 |
| ETXM309 | ETXS618 | ETXS617 |
| ETXM310 | ETXS620 | ETXS619 |
| ETXM311 | ETXS622 | ETXS621 |
| ETXM312 | ETXS624 | ETXS623 |
| ETXM313 | ETXS626 | ETXS625 |
| ETXM314 | ETXS628 | ETXS627 |
| ETXM315 | ETXS630 | ETXS629 |
| ETXM1135 | ETXS640 | ETXS639 |
| ETXM1138 | ETXS648 | ETXS647 |
| ETXM1140 | ETXS642 | ETXS641 |
| ETXM1141 | ETXS646 | ETXS645 |
| ETXM1143 | ETXS650 | ETXS649 |
| ETXM1172 | ETXS632 | ETXS631 |
| ETXM1173 | ETXS634 | ETXS633 |
| ETXM1177 | ETXS638 | ETXS637 |
| ETXM1178 | ETXS652 | ETXS633 |
| ETXM1179 | ETXS654 | ETXS637 |
| ETXM1180 | ETXS656 | ETXS641 |
| ETXM1181 | ETXS658 | ETXS645 |
| ETXM1182 | ETXS660 | ETXS649 |
| ETXM1217 | ETXS2434 | ETXS2433 |
| ETXM1218 | ETSX2436 | ETXS2433 |
| ETXM1219 | ETXS2438 | ETXS2433 |
| ETXM1220 | ETXS2440 | ETXS2433 |
| ETXM1221 | ETXS2442 | ETXS2433 |
| ETXM1222 | ETXS2444 | ETXS2433 |
| ETXM1223 | ETXS2446 | ETXS2433 |
| ETXM1224 | ETXS2448 | ETXS2433 |
| ETXM1225 | ETXS2450 | ETXS2433 |
| ETXM1226 | ETXS2452 | ETXS2435 |
| ETXM1227 | ETXS2454 | ETXS2435 |
| ETXM1228 | ETXS2456 | ETXS2435 |
| ETXM1229 | ETXS2458 | ETXS2435 |
| ETXM1230 | ETXS2460 | ETXS2435 |
| ETXM1231 | ETXS2462 | ETXS2435 |
| ETXM1232 | ETXS2464 | ETXS2435 |
| ETXM1233 | ETXS2466 | ETXS2435 |
| ETXM1234 | ETXS2468 | ETXS2435 |

[0834] For duplexes of Table 5:
[0835] ETXM116-ETXM215, ETXM236-ETXM315, ETXM1135-ETXM1182 and ETXM1217-1234 have a duplex structure according to FIG. 8a with a 2 nucleoside overhang at the 3′ end of the antisense;
[0836] ETXM216-ETXM235 have a duplex structure according to FIG. 8b, namely a 19mer blunt ended construct.

[0837] Definitions as provided in the above Tables:
[0838] A—adenosine
[0839] C—cytidine
[0840] G—guanosine
[0841] T—thymidine
[0842] m—2′-O-methyl
[0843] f—2′fluro
[0844] s—phosphorothioate bond
[0845] o—thermally destabilised nucleoside
[0846] ia—inverted abasic nucleoside

### Example 9: Inhibition Screen for HCII Expression in Human Huh7 Cells

[0847] Huh7 cells (human hepatocyte-derived cell line, obtained from JCRB Cell Bank) were maintained in Dulbecco's Modified Eagle Medium (DMEM) supplemented with 10% FBS at 37° C. in at atmosphere of 5% CO₂. Cells were transfected with siRNA duplexes targeting HCII mRNA or a negative control siRNA (siRNA-control; sense strand 5′-UUCUCCGAACGUGUCACGUTT-3′ (SEQ ID NO:788), antisense strand 5′-ACGUGACACGUUCGGAGAATT-3′ (SEQ ID NO:787)) at a final duplex concentration of 1 nM and 0.1 nM. Transfection was carried out by adding 9.7 μL Opti-MEM (ThermoFisher) plus 0.3 μL Lipofectamine RNAiMAX (ThermoFisher) to 10 μL of each siRNA duplex. The mixture was incubated at room temperature for 15 minutes before being added to 100 μL of complete growth medium containing 20,000 Huh7 cells. Cells were incubated for 24 hours at 37° C./5% CO₂ prior to total RNA purification using a RNeasy 96 Kit (Qiagen). Each duplex was tested by transfection in duplicate wells in two independent experiments.

[0848] cDNA synthesis was performed using FastQuant RT (with gDNase) Kit (Tiangen). Real-time quantitative PCR (qPCR) was performed on an ABI Prism 7900HT or ABI QuantStudio 7 with primers specific for human HCII (Hs00164821_m1) and human GAPDH (Hs02786624_g1) using FastStart Universal Probe Master Kit (Roche).

[0849] qPCR was performed in duplicate on cDNA derived from each well and the mean Ct calculated. Relative HCII expression was calculated from mean Ct values using the comparative Ct (ΔΔCt) method, normalised to GAPDH and relative to untreated cells. Based on the results of primary screen, siRNA duplexes displaying good activity were selected for dose-response follow-up. Results are shown in FIG. 9. Sequences of RNAi molecules are depicted in Table 5.

### Example 10: Dose-response for Inhibition of HCII in Human Huh7 Cells

[0850] Huh7 cells (human hepatocyte-derived cell line, obtained from JCRB Cell Bank) were maintained in Dulbecco's Modified Eagle Medium (DMEM) supplemented with 10% FBS at 37° C. in at atmosphere of 5% CO₂. Cells were transfected with siRNA duplexes targeting HCII mRNA or a negative control siRNA (siRNA-control; sense strand 5′-UUCUCCGAACGUGUCACGUTT-3′ (SEQ ID NO:788), antisense strand 5′-ACGUGACACGUUCGGAGAATT-3′ (SEQ ID NO:787)) using 10×3-fold serial dilutions over a final duplex concentration range of 20 nM to 1 pM. Transfection was carried out by adding 9.7 μL Opti-MEM (ThermoFisher) plus 0.3 μL Lipofectamine RNAiMAX (ThermoFisher) to 10 μL of each siRNA duplex. The mixture was incubated at room temperature for 15 minutes before being added to 100 μL of complete growth medium containing 20,000 Huh7 cells. Cells were incubated for 24 hours at 37° C./5% CO₂ prior to total RNA purification using a RNeasy 96 Kit (Qiagen). Each duplex was tested by transfection in duplicate wells in a single experiment.

[0851] cDNA synthesis was performed using FastQuant RT (with gDNase) Kit (Tiangen). Real-time quantitative PCR (qPCR) was performed on an ABI Prism 7900HT or ABI QuantStudio 7 with primers specific for human HCII (Hs00164821_m1) and human GAPDH (Hs02786624_g1) using FastStart Universal Probe Master Kit (Roche).

[0852] qPCR was performed in duplicate on cDNA derived from each well and the mean Ct calculated. Relative HCII expression was calculated from mean Ct values using the comparative Ct (ΔΔCt) method, normalised to GAPDH and relative to untreated cells. Maximum percent inhibition of HCII expression and IC50 values were calculated using a four parameter (variable slope) model using GraphPad Prism 9. Results are shown in FIG. 9. Sequences of RNAi molecules are depicted in the relevant Tables herein.

TABLE 6
Relative mRNA Expression

| | | | | | Mean | Mean |
|---|---|---|---|---|---|---|
| | | | | | Relative | Relative |
| | Antisense | SEQ ID NO | Sense | SEQ ID NO | Expression/ | Expression/ |
| Duplex ID | strand ID | (AS - mod) | strand ID | (SS - mod) | 0.1 nM | 1 nM |
| ETXM116 | ETXS232 | SEQ ID NO: 362 | ETXS231 | SEQ ID NO: 562 | 0.93 | 0.4 |
| ETXM117 | ETXS234 | SEQ ID NO: 363 | ETXS233 | SEQ ID NO: 563 | 1 | 0.47 |
| ETXM118 | ETXS236 | SEQ ID NO: 364 | ETXS235 | SEQ ID NO: 564 | 0.95 | 0.42 |
| ETXM119 | ETXS238 | SEQ ID NO: 365 | ETXS237 | SEQ ID NO: 565 | 1.03 | 0.86 |
| ETXM120 | ETXS240 | SEQ ID NO: 366 | ETXS239 | SEQ ID NO: 566 | 0.95 | 0.6 |
| ETXM121 | ETXS242 | SEQ ID NO: 367 | ETXS241 | SEQ ID NO: 567 | 0.89 | 0.54 |
| ETXM122 | ETXS244 | SEQ ID NO: 368 | ETXS243 | SEQ ID NO: 568 | 1.01 | 0.77 |
| ETXM123 | ETXS246 | SEQ ID NO: 369 | ETXS245 | SEQ ID NO: 569 | 1.03 | 0.73 |
| ETXM124 | ETXS248 | SEQ ID NO: 370 | ETXS247 | SEQ ID NO: 570 | 0.84 | 0.38 |
| ETXM125 | ETXS250 | SEQ ID NO: 371 | ETXS249 | SEQ ID NO: 571 | 0.88 | 0.6 |
| ETXM126 | ETXS252 | SEQ ID NO: 372 | ETXS251 | SEQ ID NO: 572 | 0.68 | 0.31 |
| ETXM127 | ETXS254 | SEQ ID NO: 373 | ETXS253 | SEQ ID NO: 573 | 0.84 | 0.57 |
| ETXM128 | ETXS256 | SEQ ID NO: 374 | ETXS255 | SEQ ID NO: 574 | 0.67 | 0.36 |
| ETXM129 | ETXS258 | SEQ ID NO: 375 | ETXS257 | SEQ ID NO: 575 | 0.62 | 0.31 |
| ETXM130 | ETXS260 | SEQ ID NO: 376 | ETXS259 | SEQ ID NO: 576 | 0.59 | 0.26 |
| ETXM131 | ETXS262 | SEQ ID NO: 377 | ETXS261 | SEQ ID NO: 577 | 0.7 | 0.34 |
| ETXM132 | ETXS264 | SEQ ID NO: 378 | ETXS263 | SEQ ID NO: 578 | 0.48 | 0.22 |
| ETXM133 | ETXS266 | SEQ ID NO: 379 | ETXS265 | SEQ ID NO: 579 | 0.72 | 0.32 |
| ETXM134 | ETXS268 | SEQ ID NO: 380 | ETXS267 | SEQ ID NO: 580 | 0.66 | 0.28 |
| ETXM135 | ETXS270 | SEQ ID NO: 381 | ETXS269 | SEQ ID NO: 581 | 0.74 | 0.41 |
| ETXM136 | ETXS272 | SEQ ID NO: 382 | ETXS271 | SEQ ID NO: 582 | 0.98 | 1 |
| ETXM137 | ETXS274 | SEQ ID NO: 383 | ETXS273 | SEQ ID NO: 583 | 0.89 | 0.71 |
| ETXM138 | ETXS276 | SEQ ID NO: 384 | ETXS275 | SEQ ID NO: 584 | 0.87 | 0.78 |
| ETXM139 | ETXS278 | SEQ ID NO: 385 | ETXS277 | SEQ ID NO: 585 | 0.89 | 0.65 |
| ETXM140 | ETXS280 | SEQ ID NO: 386 | ETXS279 | SEQ ID NO: 586 | 0.81 | 0.32 |
| ETXM141 | ETXS282 | SEQ ID NO: 387 | ETXS281 | SEQ ID NO: 587 | 0.91 | 0.78 |
| ETXM142 | ETXS284 | SEQ ID NO: 388 | ETXS283 | SEQ ID NO: 588 | 0.82 | 0.46 |
| ETXM143 | ETXS286 | SEQ ID NO: 389 | ETXS285 | SEQ ID NO: 589 | 0.95 | 0.85 |
| ETXM144 | ETXS288 | SEQ ID NO: 390 | ETXS287 | SEQ ID NO: 590 | 0.93 | 0.55 |
| ETXM145 | ETXS290 | SEQ ID NO: 391 | ETXS289 | SEQ ID NO: 591 | 0.58 | 0.16 |
| ETXM146 | ETXS292 | SEQ ID NO: 392 | ETXS291 | SEQ ID NO: 592 | 0.44 | 0.2 |
| ETXM147 | ETXS294 | SEQ ID NO: 393 | ETXS293 | SEQ ID NO: 593 | 0.8 | 0.44 |
| ETXM148 | ETXS296 | SEQ ID NO: 394 | ETXS295 | SEQ ID NO: 594 | 0.85 | 0.73 |
| ETXM149 | ETXS298 | SEQ ID NO: 395 | ETXS297 | SEQ ID NO: 595 | 0.81 | 0.36 |
| ETXM150 | ETXS300 | SEQ ID NO: 396 | ETXS299 | SEQ ID NO: 596 | 0.79 | 0.59 |
| ETXM151 | ETXS302 | SEQ ID NO: 397 | ETXS301 | SEQ ID NO: 597 | 0.93 | 0.91 |
| ETXM152 | ETXS304 | SEQ ID NO: 398 | ETXS303 | SEQ ID NO: 598 | 0.86 | 0.79 |
| ETXM153 | ETXS306 | SEQ ID NO: 399 | ETXS305 | SEQ ID NO: 599 | 0.71 | 0.46 |
| ETXM154 | ETXS308 | SEQ ID NO: 400 | ETXS307 | SEQ ID NO: 600 | 0.66 | 0.38 |
| ETXM155 | ETXS310 | SEQ ID NO: 401 | ETXS309 | SEQ ID NO: 601 | 0.7 | 0.43 |
| ETXM156 | ETXS312 | SEQ ID NO: 402 | ETXS311 | SEQ ID NO: 602 | 0.63 | 0.25 |
| ETXM157 | ETXS314 | SEQ ID NO: 403 | ETXS313 | SEQ ID NO: 603 | 0.86 | 0.7 |
| ETXM158 | ETXS316 | SEQ ID NO: 404 | ETXS315 | SEQ ID NO: 604 | 0.76 | 0.5 |
| ETXM159 | ETXS318 | SEQ ID NO: 405 | ETXS317 | SEQ ID NO: 605 | 0.71 | 0.49 |
| ETXM160 | ETXS320 | SEQ ID NO: 406 | ETXS319 | SEQ ID NO: 606 | 0.54 | 0.2 |
| ETXM161 | ETXS322 | SEQ ID NO: 407 | ETXS321 | SEQ ID NO: 607 | 1.15 | 0.7 |
| ETXM162 | ETXS324 | SEQ ID NO: 408 | ETXS323 | SEQ ID NO: 608 | 1.17 | 1.24 |
| ETXM163 | ETXS326 | SEQ ID NO: 409 | ETXS325 | SEQ ID NO: 609 | 1.13 | 1.14 |
| ETXM164 | ETXS328 | SEQ ID NO: 410 | ETXS327 | SEQ ID NO: 610 | 1.12 | 1.15 |
| ETXM165 | ETXS330 | SEQ ID NO: 411 | ETXS329 | SEQ ID NO: 611 | 1.02 | 0.69 |
| ETXM166 | ETXS332 | SEQ ID NO: 412 | ETXS331 | SEQ ID NO: 612 | 0.78 | 0.41 |
| ETXM167 | ETXS334 | SEQ ID NO: 413 | ETXS333 | SEQ ID NO: 613 | 0.72 | 0.48 |
| ETXM168 | ETXS336 | SEQ ID NO: 414 | ETXS335 | SEQ ID NO: 614 | 0.74 | 0.5 |
| ETXM169 | ETXS338 | SEQ ID NO: 415 | ETXS337 | SEQ ID NO: 615 | 0.54 | 0.33 |
| ETXM170 | ETXS340 | SEQ ID NO: 416 | ETXS339 | SEQ ID NO: 616 | 0.61 | 0.36 |
| ETXM171 | ETXS342 | SEQ ID NO: 417 | ETXS341 | SEQ ID NO: 617 | 0.86 | 0.41 |
| ETXM172 | ETXS344 | SEQ ID NO: 418 | ETXS343 | SEQ ID NO: 618 | 0.95 | 0.67 |
| ETXM173 | ETXS346 | SEQ ID NO: 419 | ETXS345 | SEQ ID NO: 619 | 0.84 | 0.47 |
| ETXM174 | ETXS348 | SEQ ID NO: 420 | ETXS347 | SEQ ID NO: 620 | 0.82 | 0.69 |
| ETXM175 | ETXS350 | SEQ ID NO: 421 | ETXS349 | SEQ ID NO: 621 | 0.97 | 0.71 |
| ETXM176 | ETXS352 | SEQ ID NO: 422 | ETXS351 | SEQ ID NO: 622 | 0.93 | 0.78 |
| ETXM177 | ETXS354 | SEQ ID NO: 423 | ETXS353 | SEQ ID NO: 623 | 0.86 | 0.81 |
| ETXM178 | ETXS356 | SEQ ID NO: 424 | ETXS355 | SEQ ID NO: 624 | 0.68 | 0.4 |
| ETXM179 | ETXS358 | SEQ ID NO: 425 | ETXS357 | SEQ ID NO: 625 | 0.68 | 0.4 |
| ETXM180 | ETXS360 | SEQ ID NO: 426 | ETXS359 | SEQ ID NO: 626 | 0.28 | 0.13 |
| ETXM181 | ETXS362 | SEQ ID NO: 427 | ETXS361 | SEQ ID NO: 627 | 1.04 | 1.04 |
| ETXM182 | ETXS364 | SEQ ID NO: 428 | ETXS363 | SEQ ID NO: 628 | 0.43 | 0.23 |
| ETXM183 | ETXS366 | SEQ ID NO: 429 | ETXS365 | SEQ ID NO: 629 | 0.96 | 0.83 |
| ETXM184 | ETXS368 | SEQ ID NO: 430 | ETXS367 | SEQ ID NO: 630 | 0.97 | 0.78 |
| ETXM185 | ETXS370 | SEQ ID NO: 431 | ETXS369 | SEQ ID NO: 631 | 1.03 | 0.88 |
| ETXM186 | ETXS372 | SEQ ID NO: 432 | ETXS371 | SEQ ID NO: 632 | 0.94 | 0.71 |
| ETXM187 | ETXS374 | SEQ ID NO: 433 | ETXS373 | SEQ ID NO: 633 | 0.92 | 0.68 |
| ETXM188 | ETXS376 | SEQ ID NO: 434 | ETXS375 | SEQ ID NO: 634 | 0.68 | 0.3 |
| ETXM189 | ETXS378 | SEQ ID NO: 435 | ETXS377 | SEQ ID NO: 635 | 0.76 | 0.66 |
| ETXM190 | ETXS380 | SEQ ID NO: 436 | ETXS379 | SEQ ID NO: 636 | 0.81 | 0.48 |
| ETXM191 | ETXS382 | SEQ ID NO: 437 | ETXS381 | SEQ ID NO: 637 | 0.86 | 0.42 |
| ETXM192 | ETXS384 | SEQ ID NO: 438 | ETXS383 | SEQ ID NO: 638 | 1 | 0.56 |
| ETXM193 | ETXS386 | SEQ ID NO: 439 | ETXS385 | SEQ ID NO: 639 | 1.07 | 0.84 |
| ETXM194 | ETXS388 | SEQ ID NO: 440 | ETXS387 | SEQ ID NO: 640 | 1.06 | 0.86 |
| ETXM195 | ETXS390 | SEQ ID NO: 441 | ETXS389 | SEQ ID NO: 641 | 0,95 | 0.66 |
| ETXM196 | ETXS392 | SEQ ID NO: 442 | ETXS391 | SEQ ID NO: 642 | 1.21 | 1.12 |
| ETXM197 | ETXS394 | SEQ ID NO: 443 | ETXS393 | SEQ ID NO: 643 | 1.29 | 0.94 |
| ETXM198 | ETXS396 | SEQ ID NO: 444 | ETXS395 | SEQ ID NO: 644 | 1.06 | 0.41 |
| ETXM199 | ETXS398 | SEQ ID NO: 445 | ETXS397 | SEQ ID NO: 645 | 1.07 | 0.67 |
| ETXM200 | ETXS400 | SEQ ID NO: 446 | ETXS399 | SEQ ID NO: 646 | 1.08 | 0.65 |
| ETXM201 | ETXS402 | SEQ ID NO: 447 | ETXS401 | SEQ ID NO: 647 | 0.97 | 0.5 |
| ETXM202 | ETXS404 | SEQ ID NO: 448 | ETXS403 | SEQ ID NO: 648 | 1.23 | 1.16 |
| ETXM203 | ETXS406 | SEQ ID NO: 449 | ETXS405 | SEQ ID NO: 649 | 0.86 | 0.45 |
| ETXM204 | ETXS408 | SEQ ID NO: 450 | ETXS407 | SEQ ID NO: 650 | 1.11 | 1.24 |
| ETXM205 | ETXS410 | SEQ ID NO: 451 | ETXS409 | SEQ ID NO: 651 | 1.12 | 0.89 |
| ETXM206 | ETXS412 | SEQ ID NO: 452 | ETXS411 | SEQ ID NO: 652 | 1.17 | 0.92 |
| ETXM207 | ETXS414 | SEQ ID NO: 453 | ETXS413 | SEQ ID NO: 653 | 1.17 | 0.81 |
| ETXM208 | ETXS416 | SEQ ID NO: 454 | ETXS415 | SEQ ID NO: 654 | 0.96 | 0.53 |
| ETXM209 | ETXS418 | SEQ ID NO: 455 | ETXS417 | SEQ ID NO: 655 | 1.06 | 0.91 |
| ETXM210 | ETXS420 | SEQ ID NO: 456 | ETXS419 | SEQ ID NO: 656 | 1.12 | 0.92 |
| ETXM211 | ETXS422 | SEQ ID NO: 457 | ETXS421 | SEQ ID NO: 657 | 0.62 | 0.36 |
| ETXM212 | ETXS424 | SEQ ID NO: 458 | ETXS423 | SEQ ID NO: 658 | 0.8 | 0.64 |
| ETXM213 | ETXS426 | SEQ ID NO: 459 | ETXS425 | SEQ ID NO: 659 | 0.83 | 0.85 |
| ETXM214 | ETXS428 | SEQ ID NO: 460 | ETXS427 | SEQ ID NO: 660 | 0.78 | 0.85 |
| ETXM215 | ETXS430 | SEQ ID NO: 461 | ETXS429 | SEQ ID NO: 661 | 0.89 | 0.89 |
| ETXM216 | ETXS432 | SEQ ID NO: 462 | ETXS431 | SEQ ID NO: 662 | 0.92 | 0.67 |
| ETXM217 | ETXS434 | SEQ ID NO: 463 | ETXS433 | SEQ ID NO: 663 | 0.93 | 0.56 |
| ETXM218 | ETXS436 | SEQ ID NO: 464 | ETXS435 | SEQ ID NO: 664 | 0.86 | 0.69 |
| ETXM219 | ETXS438 | SEQ ID NO: 465 | ETXS437 | SEQ ID NO: 665 | 0.91 | 0.88 |
| ETXM220 | ETXS440 | SEQ ID NO: 466 | ETXS439 | SEQ ID NO: 666 | 0.86 | 0.7 |
| ETXM221 | ETXS442 | SEQ ID NO: 467 | ETXS441 | SEQ ID NO: 667 | 0.81 | 0.82 |
| ETXM222 | ETXS444 | SEQ ID NO: 468 | ETXS443 | SEQ ID NO: 668 | 0.74 | 0.7 |
| ETXM223 | ETXS446 | SEQ ID NO: 469 | ETXS445 | SEQ ID NO: 669 | 0.75 | 0.7 |
| ETXM224 | ETXS448 | SEQ ID NO: 470 | ETXS447 | SEQ ID NO: 670 | 0.71 | 0.51 |
| ETXM225 | ETXS450 | SEQ ID NO: 471 | ETXS449 | SEQ ID NO: 671 | 0.81 | 0.64 |
| ETXM226 | ETXS452 | SEQ ID NO: 472 | ETXS451 | SEQ ID NO: 672 | 0.92 | 0.48 |
| ETXM227 | ETXS454 | SEQ ID NO: 473 | ETXS453 | SEQ ID NO: 673 | 0.93 | 0.57 |
| ETXM228 | ETXS456 | SEQ ID NO: 474 | ETXS455 | SEQ ID NO: 674 | 0.95 | 0.72 |
| ETXM229 | ETXS458 | SEQ ID NO: 475 | ETXS457 | SEQ ID NO: 675 | 0.76 | 0.42 |
| ETXM230 | ETXS460 | SEQ ID NO: 476 | ETXS459 | SEQ ID NO: 676 | 0.84 | 0.56 |
| ETXM231 | ETXS462 | SEQ ID NO: 477 | ETXS461 | SEQ ID NO: 677 | 0.66 | 0.61 |
| ETXM232 | ETXS464 | SEQ ID NO: 478 | ETXS463 | SEQ ID NO: 678 | 0.69 | 0.68 |
| ETXM233 | ETXS466 | SEQ ID NO: 479 | ETXS465 | SEQ ID NO: 679 | 0.41 | 0.25 |
| ETXM234 | ETXS468 | SEQ ID NO: 480 | ETXS467 | SEQ ID NO: 680 | 0.58 | 0.27 |
| ETXM235 | ETXS470 | SEQ ID NO: 481 | ETXS469 | SEQ ID NO: 681 | 0.66 | 0.46 |
| ETXM236 | ETXS472 | SEQ ID NO: 482 | ETXS471 | SEQ ID NO: 682 | 0.81 | 0.3 |
| ETXM237 | ETXS474 | SEQ ID NO: 483 | ETXS473 | SEQ ID NO: 683 | 0.92 | 0.37 |
| ETXM238 | ETXS476 | SEQ ID NO: 484 | ETXS475 | SEQ ID NO: 684 | 0.67 | 0.24 |
| ETXM239 | ETXS478 | SEQ ID NO: 485 | ETXS477 | SEQ ID NO: 685 | 1.09 | 0.77 |
| ETXM240 | ETXS480 | SEQ ID NO: 486 | ETXS479 | SEQ ID NO: 686 | 0.93 | 0.58 |
| ETXM241 | ETXS482 | SEQ ID NO: 487 | ETXS48] | SEQ ID NO: 687 | 1.12 | 0.91 |
| ETXM242 | ETXS484 | SEQ ID NO: 488 | ETXS483 | SEQ ID NO: 688 | 1.1 | 1.03 |
| ETXM243 | ETXS486 | SEQ ID NO: 489 | ETXS485 | SEQ ID NO: 689 | 1.09 | 0.89 |
| ETXM244 | ETXS488 | SEQ ID NO: 490 | ETXS487 | SEQ ID NO: 690 | 0.91 | 0.48 |
| ETXM245 | ETXS490 | SEQ ID NO: 491 | ETXS489 | SEQ ID NO: 691 | 0.93 | 0.56 |
| ETXM246 | ETXS492 | SEQ ID NO: 492 | ETXS491 | SEQ ID NO: 692 | 0.69 | 0.34 |
| ETXM247 | ETXS494 | SEQ ID NO: 493 | ETXS493 | SEQ ID NO: 693 | 0.93 | 0.7 |
| ETXM248 | ETXS496 | SEQ ID NO: 494 | ETXS495 | SEQ ID NO: 694 | 0.8 | 0.44 |
| ETXM249 | ETXS498 | SEQ ID NO: 495 | ETXS497 | SEQ ID NO: 695 | 0.84 | 0.44 |
| ETXM250 | ETXS500 | SEQ ID NO: 496 | ETXS499 | SEQ ID NO: 696 | 0.81 | 0.39 |
| ETXM251 | ETXS502 | SEQ ID NO: 497 | ETXS501 | SEQ ID NO: 697 | 0.67 | 0.41 |
| ETXM252 | ETXS504 | SEQ ID NO: 498 | ETXS503 | SEQ ID NO: 698 | 0.51 | 0.34 |
| ETXM253 | ETXS506 | SEQ ID NO: 499 | ETXS505 | SEQ ID NO: 699 | 0.57 | 0.37 |
| ETXM254 | ETXS508 | SEQ ID NO: 500 | ETXS507 | SEQ ID NO: 700 | 0.65 | 0.43 |
| ETXM255 | ETXS510 | SEQ ID NO: 501 | ETXS509 | SEQ ID NO: 701 | 0.73 | 0.65 |
| ETXM256 | ETXS512 | SEQ ID NO: 502 | ETXS511 | SEQ ID NO: 702 | 0.77 | 0.36 |
| ETXM257 | ETXS514 | SEQ ID NO: 503 | ETXS513 | SEQ ID NO: 703 | 0.92 | 0.43 |
| ETXM258 | ETXS516 | SEQ ID NO: 504 | ETXS515 | SEQ ID NO: 704 | 0.62 | 0.24 |
| ETXM259 | ETXS518 | SEQ ID NO: 505 | ETXS517 | SEQ ID NO: 705 | 0.96 | 0.58 |
| ETXM260 | ETXS520 | SEQ ID NO: 506 | ETXS519 | SEQ ID NO: 706 | 0.86 | 0.54 |
| ETXM261 | ETXS522 | SEQ ID NO: 507 | ETXS521 | SEQ ID NO: 707 | 0.92 | 0.67 |
| ETXM262 | ETXS524 | SEQ ID NO: 508 | ETXS523 | SEQ ID NO: 708 | 0.89 | 0.73 |
| ETXM263 | ETXS526 | SEQ ID NO: 509 | ETXS525 | SEQ ID NO: 709 | 0.76 | 0.59 |
| ETXM264 | ETXS528 | SEQ ID NO: 510 | ETXS527 | SEQ ID NO: 710 | 0.78 | 0.42 |
| ETXM265 | ETXS530 | SEQ ID NO: 511 | ETXS529 | SEQ ID NO: 711 | 0.74 | 0.52 |
| ETXM266 | ETXS532 | SEQ ID NO: 512 | ETXS531 | SEQ ID NO: 712 | 0.79 | 0.32 |
| ETXM267 | ETXS534 | SEQ ID NO: 513 | ETXS533 | SEQ ID NO: 713 | 0.98 | 0.51 |
| ETXM268 | ETXS536 | SEQ ID NO: 514 | ETXS535 | SEQ ID NO: 714 | 0.92 | 0.39 |
| ETXM269 | ETXS538 | SEQ ID NO: 515 | ETXS537 | SEQ ID NO: 715 | 0.78 | 0.34 |
| ETXM270 | ETXS540 | SEQ ID NO: 516 | ETXS539 | SEQ ID NO: 716 | 0.82 | 0.51 |
| ETXM271 | ETXS542 | SEQ ID NO: 517 | ETXS541 | SEQ ID NO: 717 | 0.7 | 0.39 |
| ETXM272 | ETXS544 | SEQ ID NO: 518 | ETXS543 | SEQ ID NO: 718 | 0.56 | 0.22 |
| ETXM273 | ETXS546 | SEQ ID NO: 519 | ETXS545 | SEQ ID NO: 719 | 0.58 | 0.27 |
| ETXM274 | ETXS548 | SEQ ID NO: 520 | ETXS547 | SEQ ID NO: 720 | 0.71 | 0.34 |
| ETXM275 | ETXS550 | SEQ ID NO: 521 | ETXS549 | SEQ ID NO: 721 | 0.78 | 0.51 |
| ETXM276 | ETXS552 | SEQ ID NO: 522 | ETXS551 | SEQ ID NO: 722 | 0.93 | 0.43 |
| ETXM277 | ETXS554 | SEQ ID NO: 523 | ETXS553 | SEQ ID NO: 723 | 1.12 | 0.76 |
| ETXM278 | ETXS556 | SEQ ID NO: 524 | ETXS555 | SEQ ID NO: 724 | 0.75 | 0.35 |
| ETXM279 | ETXS558 | SEQ ID NO: 525 | ETXS557 | SEQ ID NO: 725 | 1.02 | 1.01 |
| ETXM280 | ETXS560 | SEQ ID NO: 526 | ETXS559 | SEQ ID NO: 726 | 1.01 | 0.9 |
| ETXM281 | ETXS562 | SEQ ID NO: 527 | ETXS561 | SEQ ID NO: 727 | 1.2 | 0.98 |
| ETXM282 | ETXS564 | SEQ ID NO: 528 | ETXS563 | SEQ ID NO: 728 | 1.23 | 0.98 |
| ETXM283 | ETXS566 | SEQ ID NO: 529 | ETXS565 | SEQ ID NO: 729 | 1.22 | 0.91 |
| ETXM284 | ETXS568 | SEQ ID NO: 530 | ETXS567 | SEQ ID NO: 730 | 0.97 | 0.45 |
| ETXM285 | ETXS570 | SEQ ID NO: 531 | ETXS569 | SEQ ID NO: 731 | 1.34 | 0.94 |
| ETXM286 | ETXS572 | SEQ ID NO: 532 | ETXS571 | SEQ ID NO: 732 | 0.88 | 0.48 |
| ETXM287 | ETXS574 | SEQ ID NO: 533 | ETXS573 | SEQ ID NO: 733 | 0.84 | 0.64 |
| ETXM288 | ETXS576 | SEQ ID NO: 534 | ETXS575 | SEQ ID NO: 734 | 0.85 | 0.43 |
| ETXM289 | ETXS578 | SEQ ID NO: 535 | ETXS577 | SEQ ID NO: 735 | 0.76 | 0.42 |
| ETXM290 | ETXS580 | SEQ ID NO: 536 | ETXS579 | SEQ ID NO: 736 | 0.81 | 0.45 |
| ETXM291 | ETXS582 | SEQ ID NO: 537 | ETXS581 | SEQ ID NO: 737 | 0.81 | 0.4 |
| ETXM292 | ETXS584 | SEQ ID NO: 538 | ETXS583 | SEQ ID NO: 738 | 0.48 | 0.28 |
| ETXM293 | ETXS586 | SEQ ID NO: 539 | ETXS585 | SEQ ID NO: 739 | 0.56 | 0.25 |
| ETXM294 | ETXS588 | SEQ ID NO: 540 | ETXS587 | SEQ ID NO: 740 | 0.62 | 0.32 |
| ETXM295 | ETXS590 | SEQ ID NO: 541 | ETXS589 | SEQ ID NO: 741 | 1 | 0.67 |
| ETXM296 | ETXS592 | SEQ ID NO: 542 | ETXS591 | SEQ ID NO: 742 | 0.71 | 0.5 |
| ETXM297 | ETXS594 | SEQ ID NO: 543 | ETXS593 | SEQ ID NO: 743 | 0.74 | 0.46 |
| ETXM298 | ETXS596 | SEQ ID NO: 544 | ETXS595 | SEQ ID NO: 744 | 0.65 | 0.29 |
| ETXM299 | ETXS598 | SEQ ID NO: 545 | ETXS597 | SEQ ID NO: 745 | 0.82 | 0.65 |
| ETXM300 | ETXS600 | SEQ ID NO: 546 | ETXS599 | SEQ ID NO: 746 | 0.81 | 0.6 |
| ETXM301 | ETXS602 | SEQ ID NO: 547 | ETXS601 | SEQ ID NO: 747 | 0.97 | 0.94 |
| ETXM302 | ETXS604 | SEQ ID NO: 548 | ETXS603 | SEQ ID NO: 748 | 1.13 | 0.85 |
| ETXM303 | ETXS606 | SEQ ID NO: 549 | ETXS605 | SEQ ID NO: 749 | 1.08 | 0.69 |
| ETXM304 | ETXS608 | SEQ ID NO: 550 | ETXS607 | SEQ ID NO: 750 | 0.99 | 0.41 |
| ETXM305 | ETXS610 | SEQ ID NO: 551 | ETXS609 | SEQ ID NO: 751 | 1.14 | 0.78 |
| ETXM306 | ETXS612 | SEQ ID NO: 552 | ETXS611 | SEQ ID NO: 752 | 0.74 | 0.43 |
| ETXM307 | ETXS614 | SEQ ID NO: 553 | ETXS613 | SEQ ID NO: 753 | 0.81 | 0.53 |
| ETXM308 | ETXS616 | SEQ ID NO: 554 | ETXS615 | SEQ ID NO: 754 | 0.68 | 0.36 |
| ETXM309 | ETXS618 | SEQ ID NO: 555 | ETXS617 | SEQ ID NO: 755 | 0.63 | 0.26 |
| ETXM310 | ETXS620 | SEQ ID NO: 556 | ETXS619 | SEQ ID NO: 756 | 0.76 | 0.43 |
| ETXM311 | ETXS622 | SEQ ID NO: 557 | ETXS621 | SEQ ID NO: 757 | 0.71 | 0.36 |
| ETXM312 | ETXS624 | SEQ ID NO: 558 | ETXS623 | SEQ ID NO: 758 | 0.62 | 0.25 |
| ETXM313 | ETXS626 | SEQ ID NO: 559 | ETXS625 | SEQ ID NO: 759 | 0.79 | 0.31 |
| ETXM314 | ETXS628 | SEQ ID NO: 560 | ETXS627 | SEQ ID NO: 760 | 0.65 | 0.25 |
| ETXM315 | ETXS630 | SEQ ID NO: 561 | ETXS629 | SEQ ID NO: 761 | 0.96 | 0.66 |

TABLE 7
Dose-Response Data Table

| | Antisense | SEQ ID NO | Sense | SEQ ID NO | IC₅₀ | % Max |
|---|---|---|---|---|---|---|
| Duplex ID | strand ID | (AS - mod) | strand ID | (SS - mod) | [pM] | Inhibition |
| ETXM130 | ETXS260 | SEQ ID NO: 376 | ETXS259 | SEQ ID NO: 576 | 265 | 81 |
| ETXM132 | ETXS264 | SEQ ID NO: 378 | ETXS263 | SEQ ID NO: 578 | 142 | 89 |
| ETXM133 | ETXS266 | SEQ ID NO: 379 | ETXS265 | SEQ ID NO: 579 | 286 | 86 |
| ETXM145 | ETXS290 | SEQ ID NO: 391 | ETXS289 | SEQ ID NO: 591 | 131 | 82 |
| ETXM146 | ETXS292 | SEQ ID NO: 392 | ETXS291 | SEQ ID NO: 592 | 83 | 79 |
| ETXM156 | ETXS312 | SEQ ID NO: 402 | ETXS311 | SEQ ID NO: 602 | 918 | 90 |
| ETXM160 | ETXS320 | SEQ ID NO: 406 | ETXS319 | SEQ ID NO: 606 | 583 | 81 |
| ETXM180 | ETXS360 | SEQ ID NO: 426 | ETXS359 | SEQ ID NO: 626 | 78 | 87 |
| ETXM182 | ETXS364 | SEQ ID NO: 428 | ETXS363 | SEQ ID NO: 628 | 65 | 81 |
| ETXM188 | ETXS376 | SEQ ID NO: 434 | ETXS375 | SEQ ID NO: 634 | 519 | 88 |
| ETXM218 | ETXS436 | SEQ ID NO: 464 | ETXS435 | SEQ ID NO: 664 | 826 | 80 |
| ETXM229 | ETXS458 | SEQ ID NO: 475 | ETXS457 | SEQ ID NO: 675 | 585 | 87 |
| ETXM230 | ETXS460 | SEQ ID NO: 476 | ETXS459 | SEQ ID NO: 676 | 1009 | 74 |
| ETXM232 | ETXS464 | SEQ ID NO: 478 | ETXS463 | SEQ ID NO: 678 | 1710 | 51 |
| ETXM233 | ETXS466 | SEQ ID NO: 479 | ETXS465 | SEQ ID NO: 679 | 233 | 87 |
| ETXM234 | ETXS468 | SEQ ID NO: 480 | ETXS467 | SEQ ID NO: 680 | 508 | 90 |
| ETXM253 | ETXS506 | SEQ ID NO: 499 | ETXS505 | SEQ ID NO: 699 | 294 | 82 |
| ETXM258 | ETXS516 | SEQ ID NO: 504 | ETXS515 | SEQ ID NO: 704 | 212 | 89 |
| ETXM272 | ETXS544 | SEQ ID NO: 518 | ETXS543 | SEQ ID NO: 718 | 348 | 84 |
| ETXM273 | ETXS546 | SBQ ID NO: 519 | ETXS545 | SEQ ID NO: 719 | 320 | 86 |
| ETXM293 | ETXS586 | SEQ ID NO: 539 | ETXS585 | SEQ ID NO: 739 | 213 | 73 |
| ETXM309 | ETXS618 | SEQ ID NO: 555 | ETXS617 | SEQ ID NO: 755 | 253 | 72 |
| ETXM313 | ETXS626 | SEQ ID NO: 559 | ETXS625 | SEQ ID NO: 759 | 327 | 84 |
| ETXM314 | ETXS628 | SEQ ID NO: 560 | ETXS627 | SEQ ID NO: 760 | 214 | 81 |

[0853] The present invention is not intended to be limited in scope to the particular disclosed embodiments, which are provided, for example, to illustrate various aspects of the invention. Various modifications to the compositions and methods described will become apparent from the description and teachings herein. Such variations may be practiced without departing from the true scope and spirit of the disclosure and are intended to fall within the scope of the present disclosure.

[0854] In case of ambiguity between the sequences in this specification and the sequences in the attached sequence listing, the sequences provided herein are considered to be the correct sequences.

1. A nucleic acid for inhibiting expression of HCII, comprising a duplex region that comprises a first strand and a second strand that is at least partially complementary to the first strand, wherein said first strand is:
(i) at least partially complementary to a portion of RNA transcribed from the HCII gene, and
(ii) comprises at least 17 contiguous nucleosides differing by 0 or 1 nucleosides from any one of the first strand sequences as listed in Table 2.

2. A nucleic acid for inhibiting expression of HCII, comprising a duplex region that comprises a first strand and a second strand that is at least partially complementary to the first strand, wherein said first strand is:
(i) at least partially complementary to a portion of RNA transcribed from the HCII gene, and
(ii) comprises at least 17 contiguous nucleosides differing by 0 or 1 nucleosides from any one of the first strand modified sequences as listed in Table 3.

3. A nucleic acid according to claim 1 or 2, wherein the first strand comprises nucleosides 2-18 of any one of the sequences defined in claim 1 or 2, in particular wherein the first strand comprises nucleosides 2-18 of any one of the sequences defined in Tables 2 or 3.

4. A nucleic acid according to claim 1, wherein the second strand comprises a nucleoside sequence of at least 17 contiguous nucleosides differing by 0 or 1 nucleosides from any one of the second strand sequences as listed in Table 2, and wherein the second strand has a region of at least 85% complementarity over the 17 contiguous nucleosides to the first strand.

5. A nucleic acid according to claim 2, wherein the second strand comprises a nucleoside sequence of at least 17 contiguous nucleosides differing by 0 or 1 nucleosides from any one of the second strand modified sequences as listed in Table 4, and wherein the second strand has a region of at least 85% complementarity over the 17 contiguous nucleosides to the first strand.

6. A nucleic acid according to claim 1, wherein the first strand comprises any one of the first strand sequences as listed in Table 2.

7. A nucleic acid according to claim 2, wherein the first strand comprises any one of the first strand modified sequences as listed in Table 3.

8. A nucleic acid according to claim 4, wherein the second strand comprises any one of the second strand sequences as listed in Table 2.

9. A nucleic acid according to claim 5, wherein the second strand comprises any one of the second strand modified sequences as listed in Table 4.

10. A nucleic acid according to claim 6, wherein the first strand comprises any one of the following sequences:
SEQ ID NO: 140, SEQ ID NO: 152, SEQ ID NO: 136, SEQ ID NO: 138, SEQ ID NO: 139, SEQ ID NO: 151, SEQ ID NO: 162, SEQ ID NO: 166, SEQ ID NO: 186, SEQ ID NO: 188, SEQ ID NO: 194, SEQ ID NO: 224, SEQ ID NO: 235, SEQ ID NO: 236, SEQ ID NO: 238, SEQ ID NO: 239, SEQ ID NO: 240, SEQ ID NO: 124, SEQ ID NO: 135.

11. A nucleic acid according to claim 7, wherein the first strand comprises any one of the following sequences:
SEQ ID NO: 560, SEQ ID NO: 392, SEQ ID NO: 376, SEQ ID NO: 378, SEQ ID NO: 379, SEQ ID NO: 391, SEQ ID NO: 402, SEQ ID NO: 406, SEQ ID NO: 426, SEQ ID NO: 428, SEQ ID NO: 434, SEQ ID NO: 464, SEQ ID NO: 475, SEQ ID NO: 476, SEQ ID NO: 478, SEQ ID NO: 479, SEQ ID NO: 480, SEQ ID NO: 499, SEQ ID NO: 504, SEQ ID NO: 518, SEQ ID NO: 519, SEQ ID NO: 539, SEQ ID NO: 555, SEQ ID NO: 559.

12. A nucleic acid according to claim 8, wherein the second strand comprises any one of the following sequences:
SEQ ID NO: 260, SEQ ID NO: 272, SEQ ID NO: 256, SEQ ID NO: 258, SEQ ID NO: 259, SEQ ID NO: 271, SEQ ID NO: 282, SEQ ID NO: 286, SEQ ID NO: 306, SEQ ID NO: 308, SEQ ID NO: 314, SEQ ID NO: 344, SEQ ID NO: 355, SEQ ID NO: 356, SEQ ID NO: 358, SEQ ID NO: 359, SEQ ID NO: 360, SEQ ID NO: 244, SEQ ID NO: 255.

13. A nucleic acid according to claim 9, wherein the second strand comprises any one of the following sequences:
SEQ ID NO: 760, SEQ ID NO: 592, SEQ ID NO: 576, SEQ ID NO: 578, SEQ ID NO: 579, SEQ ID NO: 591, SEQ ID NO: 602, SEQ ID NO: 606, SEQ ID NO: 626, SEQ ID NO: 628, SEQ ID NO: 634, SEQ ID NO: 664, SEQ ID NO: 675, SEQ ID NO: 676, SEQ ID NO: 678, SEQ ID NO: 679, SEQ ID NO: 680, SEQ ID NO: 699, SEQ ID NO: 704, SEQ ID NO: 718, SEQ ID NO: 719, SEQ ID NO: 739, SEQ ID NO: 755, SEQ ID NO: 759.

14. A nucleic acid according to claims 1 and 4, comprising first and second strands that comprise, consist of, or consist essentially of a nucleoside sequence differing by 0 or 1 nucleosides from any one of the following first and second sequences:

| Unmodified first strand | Unmodified second strand |
|---|---|
| SEQ ID NO: 140 | SEQ ID NO: 260 |
| SEQ ID NO: 152 | SEQ ID NO: 272 |
| SEQ ID NO: 136 | SEQ ID NO: 256 |
| SEQ ID NO: 138 | SEQ ID NO: 258 |
| SEQ ID NO: 139 | SEQ ID NO: 259 |
| SEQ ID NO: 151 | SEQ ID NO: 271 |
| SEQ ID NO: 162 | SEQ ID NO: 282 |
| SEQ ID NO: 166 | SEQ ID NO: 286 |
| SEQ ID NO: 186 | SEQ ID NO: 306 |
| SEQ ID NO: 188 | SEQ ID NO: 308 |
| SEQ ID NO: 194 | SEQ ID NO: 314 |
| SEQ ID NO: 224 | SEQ ID NO: 344 |
| SEQ ID NO: 235 | SEQ ID NO: 355 |
| SEQ ID NO: 236 | SEQ ID NO: 356 |
| SEQ ID NO: 238 | SEQ ID NO: 358 |
| SEQ ID NO: 239 | SEQ ID NO: 359 |
| SEQ ID NO: 240 | SEQ ID NO: 360 |
| SEQ ID NO: 139 | SEQ ID NO: 259 |
| SEQ ID NO: 124 | SEQ ID NO: 244 |
| SEQ ID NO: 138 | SEQ ID NO: 258 |
| SEQ ID NO: 139 | SEQ ID NO: 259 |
| SEQ ID NO: 139 | SEQ ID NO: 259 |
| SEQ ID NO: 135 | SEQ ID NO: 255 |
| SEQ ID NO: 139 | SEQ ID NO: 259 |

15. A nucleic acid according to claims 2 and 5, comprising first and second strands that comprise, consist of, or consist essentially of a nucleoside sequence differing by 0 or 1 nucleosides from any one of the following first and second sequences:

| Modified first strand | Modified second strand |
|---|---|
| SEQ ID NO: 560 | SEQ ID NO: 760 |
| SEQ ID NO: 392 | SEQ ID NO: 592 |
| SEQ ID NO: 376 | SEQ ID NO: 576 |
| SEQ ID NO: 378 | SEQ ID NO: 578 |
| SEQ ID NO: 379 | SEQ ID NO: 579 |
| SEQ ID NO: 391 | SEQ ID NO: 591 |
| SEQ ID NO: 402 | SEQ ID NO: 602 |
| SEQ ID NO: 406 | SEQ ID NO: 606 |
| SEQ ID NO: 426 | SEQ ID NO: 626 |
| SEQ ID NO: 428 | SEQ ID NO: 628 |
| SEQ ID NO: 434 | SEQ ID NO: 634 |
| SEQ ID NO: 464 | SEQ ID NO: 664 |
| SEQ ID NO: 475 | SEQ ID NO: 675 |
| SEQ ID NO: 476 | SEQ ID NO: 676 |
| SEQ ID NO: 478 | SEQ ID NO: 678 |
| SEQ ID NO: 479 | SEQ ID NO: 679 |
| SEQ ID NO: 480 | SEQ ID NO: 680 |
| SEQ ID NO: 499 | SEQ ID NO: 699 |
| SEQ ID NO: 504 | SEQ ID NO: 704 |
| SEQ ID NO: 518 | SEQ ID NO: 718 |
| SEQ ID NO: 519 | SEQ ID NO: 719 |
| SEQ ID NO: 539 | SEQ ID NO: 739 |
| SEQ ID NO: 555 | SEQ ID NO: 755 |
| SEQ ID NO: 559 | SEQ ID NO: 759 |

16. A nucleic acid according to claim 14, comprising first and second strands that comprise, consist of, or consist essentially of a nucleoside sequence differing by 0 or 1 nucleosides from any one of the following first and second sequences:

| Unmodified first strand | Unmodified second strand |
|---|---|
| SEQ ID NO: 138 | SEQ ID NO: 258 |
| SEQ ID NO: 151 | SEQ ID NO: 271 |
| SEQ ID NO: 152 | SEQ ID NO: 272 |
| SEQ ID NO: 186 | SEQ ID NO: 306 |
| SEQ ID NO: 188 | SEQ ID NO: 308 |

17. A nucleic acid according to claim 15, comprising first and second strands that comprise, consist of, or consist essentially of a nucleoside sequence differing by 0 or 1 nucleosides from any one of the following first and second sequences:

| Modified first strand | Modified second strand |
|---|---|
| SEQ ID NO: 378 | SEQ ID NO: 578 |
| SEQ ID NO: 391 | SEQ ID NO: 591 |
| SEQ ID NO: 392 | SEQ ID NO: 592 |
| SEQ ID NO: 426 | SEQ ID NO: 626 |
| SEQ ID NO: 428 | SEQ ID NO: 628 |

18. A nucleic acid according to claim 14, comprising first and second strands that comprise, consist of, or consist essentially of a nucleoside sequence differing by 0 or 1 nucleosides from any one of the following first and second sequences:

| Unmodified first strand | Unmodified second strand |
|---|---|
| SEQ ID NO: 136 | SEQ ID NO: 256 |
| SEQ ID NO: 140 | SEQ ID NO: 260 |
| SEQ ID NO: 151 | SEQ ID NO: 271 |
| SEQ ID NO: 152 | SEQ ID NO: 272 |
| SEQ ID NO: 188 | SEQ ID NO: 308 |

19. A nucleic acid according to claim 2 or 5, comprising first and second strands that comprise, consist of, or consist essentially of a nucleoside sequence differing by 0 or 1 nucleosides from any one of the following first and second sequences:

| Modified first strand | Modified second strand |
|---|---|
| SEQ ID NO: 376 | SEQ ID NO: 576 |
| SEQ ID NO: 380 | SEQ ID NO: 580 |
| SEQ ID NO: 391 | SEQ ID NO: 591 |
| SEQ ID NO: 392 | SEQ ID NO: 592 |
| SEQ ID NO: 428 | SEQ ID NO: 628 |
| SEQ ID NO: 762 | SEQ ID NO: 772 |
| SEQ ID NO: 763 | SEQ ID NO: 773 |
| SEQ ID NO: 764 | SEQ ID NO: 774 |
| SEQ ID NO: 765 | SEQ ID NO: 775 |
| SEQ ID NO: 766 | SEQ ID NO: 776 |
| SEQ ID NO: 767 | SEQ ID NO: 777 |
| SEQ ID NO: 768 | SEQ ID NO: 778 |
| SEQ ID NO: 769 | SEQ ID NO: 779 |
| SEQ ID NO: 770 | SEQ ID NO: 780 |
| SEQ ID NO: 771 | SEQ ID NO: 781 |
| SEQ ID NO: 782 | SEQ ID NO: 773 |
| SEQ ID NO: 783 | SEQ ID NO: 775 |
| SEQ ID NO: 784 | SEQ ID NO: 777 |
| SEQ ID NO: 785 | SEQ ID NO: 779 |
| SEQ ID NO: 786 | SEQ ID NO: 781 |

20. A nucleic acid according to claims 1 and 4, comprising first and second strands that comprise, consist of, or consist essentially of a nucleoside sequence differing by 0 or 1 nucleosides from any one of the following first and second sequences:

| Unmodified first strand | Unmodified second strand |
|---|---|
| SEQ ID NO: 140 | SEQ ID NO: 260 |
| SEQ ID NO: 152 | SEQ ID NO: 272 |

21. A nucleic acid according to claims 2 and 5, comprising first and second strands that comprise, consist of, or consist essentially of a nucleoside sequence differing by 0 or 1 nucleosides from any one of the following first and second sequences:

| Modified first strand | Modified second strand |
|---|---|
| SEQ ID NO: 764 | SEQ ID NO: 774 |
| SEQ ID NO: 789 | SEQ ID NO: 807 |
| SEQ ID NO: 790 | SEQ ID NO: 807 |
| SEQ ID NO: 791 | SEQ ID NO: 807 |
| SEQ ID NO: 792 | SEQ ID NO: 807 |
| SEQ ID NO: 793 | SEQ ID NO: 807 |
| SEQ ID NO: 794 | SEQ ID NO: 807 |
| SEQ ID NO: 795 | SEQ ID NO: 807 |
| SEQ ID NO: 795 | SEQ ID NO: 807 |
| SEQ ID NO: 797 | SEQ ID NO: 807 |

22. A nucleic acid according to claims 2 and 5, comprising first and second strands that comprise, consist of, or consist essentially of a nucleoside sequence differing by 0 or 1 nucleosides from any one of the following first and second sequences:

| Modified first strand | Modified second strand |
|---|---|
| SEQ ID NO: 768 | SEQ ID NO: 778 |
| SEQ ID NO: 798 | SEQ ID NO: 808 |
| SEQ ID NO: 799 | SEQ ID NO: 808 |
| SEQ ID NO: 800 | SEQ ID NO: 808 |
| SEQ ID NO: 801 | SEQ ID NO: 808 |
| SEQ ID NO: 802 | SEQ ID NO: 808 |
| SEQ ID NO: 803 | SEQ ID NO: 808 |
| SEQ ID NO: 804 | SEQ ID NO: 808 |
| SEQ ID NO: 805 | SEQ ID NO: 808 |
| SEQ ID NO: 806 | SEQ ID NO: 808 |

23. A nucleic acid according to claims 2 and 5, comprising first and second strands that comprise, consist of, or consist essentially of a nucleoside sequence differing by 0 or 1 nucleosides from any one of the following first and second sequences:

| Modified first strand | Modified second strand |
|---|---|
| SEQ ID NO: 764 | SEQ ID NO: 774 |
| SEQ ID NO: 768 | SEQ ID NO: 778 |

24. A nucleic acid according to any preceding claim, wherein the first strand has a length in the range of 17 to 30 nucleosides, preferably 19 to 25 nucleosides, more preferably 19 or 23 nucleosides.

25. A nucleic acid according to any preceding claim, wherein the second strand has a length in the range of 17 to 30 nucleosides, preferably 19 to 25 nucleosides, more preferably 19 or 21 nucleosides.

26. A nucleic acid according to any preceding claim, wherein the duplex region of the nucleic acid is between 17 and 30 nucleosides in length, more preferably is 19 or 21 nucleosides in length.

27. A nucleic acid according to any preceding claim, wherein the region of complementarity between the first strand and the portion of RNA transcribed from the HCII gene is between 17 and 30 nucleosides in length.

28. A nucleic acid according to any preceding claim, wherein the nucleic acid comprises one or more single-stranded nucleoside overhangs, optionally wherein the overhang is present on the first or second strand, preferably at the 3′ terminus of the first or second strand, and/or wherein the overhang comprises 1 to 4 nucleosides, more preferably 2 nucleosides.

29. A nucleic acid according to any preceding claim, wherein the nucleic acid is an siRNA oligonucleoside.

30. A nucleic acid according to any preceding claim, wherein one or more nucleosides on the first and/or second strand are modified, to form modified nucleosides.

31. A nucleic acid according to claim 30, wherein one or more nucleosides on the first and/or second strand comprise terminal modifications, base modifications, sugar modifications and/or backbone modifications.

32. A nucleic acid according to claim 30, wherein one or more nucleosides on the first and/or second strand comprise sugar modifications, wherein the modification is a modification at the 2′-OH group of the ribose sugar.

33. A nucleic acid according to claim 32, wherein the sugar modifications comprise 2′-Me and/or 2′-F modifications.

34. A nucleic acid according to claim 30, wherein the first strand comprises a 2′-F modification at any of position 2, position 6, position 14, or any combination thereof, counting from position 1 of said first strand.

35. A nucleic acid according to claim 30, wherein the second strand comprises a 2′-F modification at any of position 7, position 9, position 11, or any combination thereof, counting from position 1 of said second strand.

36. A nucleic acid according to claim 30, wherein the first and second strand each comprise 2′-Me and 2′-F modifications.

37. A nucleic according to claim 30, wherein the nucleic acid comprises at least one thermally destabilizing modification, suitably at one or more of positions 1 to 9 of the first strand counting from position 1 of the first strand, and/or at one or more of positions on the second strand aligned with positions 1 to 9 of the first strand, wherein the destabilizing modification is selected from a modified unlocked nucleic acid (UNA) and a glycol nucleic acid (GNA), preferably a glycol nucleic acid, more preferably an (S)-glycol nucleic acid, wherein more preferably the nucleic acid comprises at least one thermally destabilizing modification at position 7 of the first strand, counting from position 1 of the first strand.

38. A nucleic acid according to claim 30, which is an siRNA oligonucleoside, wherein the siRNA oligonucleoside comprises 3 or more 2′-F modifications at positions 6 to 12 of the second strand, such as 4, 5, 6 or 7 2′-F modifications at positions 6 to 12 of the second strand, counting from position 1 of said second strand.

39. A nucleic acid according to claim 30, which is an siRNA oligonucleoside, wherein said second strand comprises at least 3, such as 4, 5 or 6, 2′-Me modifications at positions 1 to 6 of the second strand, counting from position 1 of said second strand.

40. A nucleic acid according to claim 30, which is an siRNA oligonucleoside, wherein said first strand comprises at least 5 2′-Me consecutive modifications at the 3′ terminal region, preferably including the terminal nucleoside at the 3′ terminal region, or at least within 1 or 2 nucleosides from the terminal nucleoside at the 3′ terminal region.

41. A nucleic acid according to claim 30, which is an siRNA oligonucleoside, wherein said first strand comprises 7 2′-Me consecutive modifications at the 3′ terminal region, preferably including the terminal nucleoside at the 3′ terminal region.

42. A nucleic acid according to claim 30, which is an siRNA oligonucleoside, wherein each of the first and second strands comprises an alternating modification pattern, preferably a fully alternating modification pattern along the entire length of each of the first and second strands, wherein the nucleosides of the first strand are modified by (i) 2′Me modifications on the odd numbered nucleosides counting from position 1 of the first strand, and (ii) 2′F modifications on the even numbered nucleosides counting from position 1 of the first strand, and nucleosides of the second strand are modified by (i) 2′F modifications on the odd numbered nucleosides counting from position 1 of the second strand, and (ii) 2′Me modifications on the even numbered nucleosides counting from position 1 of the second strand.

43. A nucleic acid according to claim 30, which is an siRNA oligonucleoside, wherein nucleosides of said first strand comprise a 2′ sugar modification pattern wherein said modifications are selected at least from 2′Me and 2′F sugar modifications, provided that the overall number of 2′F sugar modifications in the first strand does not consist of four, or six, 2′F modifications

44. A nucleic acid according to claim 30, which is an siRNA oligonucleoside, wherein nucleosides of said first strand comprise a 2′ sugar modification pattern wherein said modifications are selected at least from 2′Me and 2′F sugar modifications, wherein the overall number of 2′F sugar modifications in the first strand consists of three, five or seven 2′F modifications.

45. A nucleic acid according to any preceding claim, which further comprises one or more abasic nucleosides, optionally wherein the one or more abasic nucleosides are in a terminal region of the second strand, and/or wherein at least one abasic nucleoside is linked to an adjacent basic nucleoside through a reversed internucleoside linkage.

46. A nucleic acid according to claim 45, wherein the second strand comprises 2 consecutive abasic nucleosides in the 5′ terminal region of the second strand, wherein one such abasic nucleoside is a terminal nucleoside at the 5′ terminal region of the second strand and the other abasic nucleoside is a penultimate nucleoside at the 5′ terminal region of the second strand, wherein:
(a) said penultimate abasic nucleoside is connected to an adjacent first basic nucleoside in an adjacent 5′ near terminal region through a reversed internucleoside linkage; and
(b) the reversed linkage is a 5-5′ reversed linkage; and
(c) the linkage between the terminal and penultimate abasic nucleosides is 3′5′ when reading towards the terminus comprising the terminal and penultimate abasic nucleosides.

47. A nucleic acid according to claim 45, wherein the second strand comprises 2 consecutive abasic nucleosides preferably in an overhang in the 3′ terminal region of the second strand, wherein one such abasic nucleoside is a terminal nucleoside at the 3′ terminal region of the second strand and the other abasic nucleoside is a penultimate nucleoside at the 3′ terminal region of the second strand, wherein:
(a) said penultimate abasic nucleoside is connected to an adjacent first basic nucleoside in an adjacent 3′ near terminal region through a reversed internucleoside linkage; and
(b) the reversed linkage is a 3-3′ reversed linkage; and
(c) the linkage between the terminal and penultimate abasic nucleosides is 5′-3′ when reading towards the terminus comprising the terminal and penultimate abasic nucleosides.

48. A nucleic acid according to claim 46, wherein
(i) the first strand and the second strand each has a length of 23 nucleosides;
(ii) two phosphorothioate internucleoside linkages are respectively between three consecutive positions in said 5′ near terminal region of the second strand, wherein a first phosphorothioate internucleoside linkage is present between said adjacent first basic nucleoside of (a) and an adjacent second basic nucleoside in said 5′ near terminal region of the second strand, and a second phosphorothioate internucleoside linkage is present between said adjacent second basic nucleoside and an adjacent third basic nucleoside in said 5′ near terminal region of the second strand;
(iii) two phosphorothioate internucleoside linkages are respectively between three consecutive positions in both 5′ and 3′ terminal regions of the first strand, whereby a terminal nucleoside respectively at each of the 5′ and 3′ terminal regions of said first strand is each attached to a respective 5′ and 3′ adjacent penultimate nucleoside by a phosphorothioate internucleoside linkage, and each first 5′ and 3′ penultimate nucleoside is attached to a respective 5′ and 3′ adjacent antepenultimate nucleoside by a phosphorothioate internucleoside linkage; and
(iv) the second strand of the nucleic acid is conjugated directly or indirectly to one or more ligand moieties at the 3′ terminal region of the second strand.

49. A nucleic acid according to claim 47, wherein
(i) the first strand and the second strand each has a length of 23 nucleosides;
(ii) two phosphorothioate internucleoside linkages are respectively between three consecutive positions in said 3′ near terminal region of the second strand, wherein a first phosphorothioate internucleoside linkage is present between said adjacent first basic nucleoside of (a) and an adjacent second basic nucleoside in said 3′ near terminal region of the second strand, and a second phosphorothioate internucleoside linkage is present between said adjacent second basic nucleoside and an adjacent third basic nucleoside in said 3′ near terminal region of the second strand;
(iii) two phosphorothioate internucleoside linkages are respectively between three consecutive positions in both 5′ and 3′ terminal regions of the first strand, whereby a terminal nucleoside respectively at each of the 5′ and 3′ terminal regions of said first strand is each attached to a respective 5′ and 3′ adjacent penultimate nucleoside by a phosphorothioate internucleoside linkage, and each first 5′ and 3′ penultimate nucleoside is attached to a respective 5′ and 3′ adjacent antepenultimate nucleoside by a phosphorothioate internucleoside linkage; and
(iv) the second strand of the nucleic acid is conjugated directly or indirectly to one or more ligand moieties at the 5′ terminal region of the second strand.

50. A nucleic acid according to any preceding claim, wherein the nucleic acid comprises one or more phosphorothioate internucleoside linkages.

51. A nucleic acid according to claim 50, wherein said one or more phosphorothioate internucleoside linkages are respectively between at least three consecutive positions in a 5′ or 3′ near terminal region of the second strand, whereby said near terminal region is preferably adjacent said terminal region wherein one or more abasic nucleosides of said second strand is/are located according to at least claim 47.

52. A nucleic acid according to claim 50 or 51, wherein said one or more phosphorothioate internucleoside linkages are respectively between at least three consecutive positions in a 5′ and/or 3′ terminal region of the first strand, whereby preferably a terminal position at the 5′ and/or 3′ terminal region of said first strand is attached to its adjacent position by a phosphorothioate internucleoside linkage.

53. A nucleic acid according to claim 33, wherein said modified nucleosides of said second strand comprise a modification pattern according to any one of the following (5′-3′):
Me-Me-Me-Me-Me-Me-F-F-F-F-F-Me-Me-Me-Me-Me-Me-Me-
F-Me-Me,
or
Me-Me-Me-Me-Me-F-F-Me-F-F-F-F-Me-Me-Me-Me-Me-Me-
Me-Me-Me,
or
Me-Me-Me-Me-Me-Me-F-Me-F-F-F-F-Me-Me-Me-Me-Me-
Me-Me-Me-Me,
or
Me-Me-Me-Me-Me-Me-Me-Me-F-F-F-Me-Me-Me-Me-Me-Me-
Me-Me-Me-Me,
or
Me-Me-Me-Me-Me-Me-F-Me-F-F-F-Me-Me-Me-Me-Me-Me-
Me-Me-Me-Me.

54. A nucleic acid according to claim 33, wherein said modified nucleosides of said second strand comprise a modification pattern according to any one of the following (5′-3′):
(Me)₈-(F)₃-(Me)₁₀.

55. A nucleic acid according to claim 53, wherein said modified nucleosides of said second strand comprise a modification pattern according to any one of the following (5′-3′):
Me(s)Me(s)Me-Me-Me-Me-F-F-F-F-F-Me-Me-Me-Me-Me-
Me-Me-F-Me-Me,
or
Me(s)Me(s)Me-Me-Me-F-F-Me-F-F-F-F-Me-Me-Me-Me-
Me-Me-Me-Me-Me,
or
Me(s)Me(s)Me-Me-Me-Me-F-Me-F-F-F-F-Me-Me-Me-Me-
Me-Me-Me-Me-Me,
or
Me(s)Me(s)Me-Me-Me-Me-Me-Me-F-F-F-Me-Me-Me-Me-
Me-Me-Me-Me-Me-Me,
or
Me(s)Me(s)Me-Me-Me-Me-F-Me-F-F-F-Me-Me-Me-Me-
Me-Me-Me-Me-Me-Me,
or
Me-Me-Me-Me-Me-Me-F-F-F-F-F-Me-Me-Me-Me-Me-Me-Me-
F(s)Me(s)Me,
or
Me-Me-Me-Me-Me-F-F-Me-F-F-F-F-Me-Me-Me-Me-Me-Me-
Me(s)Me(s)Me,
or
Me-Me-Me-Me-Me-Me-F-Me-F-F-F-F-Me-Me-Me-Me-Me-
Me-Me(s)Me(s)Me,
or
Me-Me-Me-Me-Me-Me-Me-Me-F-F-F-Me-Me-Me-Me-Me-Me-
Me-Me(s)Me(s)Me,
or
Me-Me-Me-Me-Me-Me-F-Me-F-F-F-Me-Me-Me-Me-Me-Me-
Me-Me(s)Me(s)Me,
wherein(s) is a phosphorothioate internucleoside linkage.

56. A nucleic acid according to claim 54, wherein said modified nucleosides of said second strand comprise a modification pattern according to any one of the following (5′-3′):
Me(s)Me(s)(Me)₆-(F)₃-(Me)₁₀
wherein(s) is a phosphorothioate internucleoside linkage.

57. A nucleic acid according to claim 53, wherein said modified nucleosides of said second strand comprise a modification pattern according to any one of the following (5′-3′):
ia-ia-Me-Me-Me-Me-Me-Me-F-F-F-F-F-Me-Me-Me-Me-
Me-Me-Me-F-Me-Me,
or
ia-ia-Me-Me-Me-Me-Me-F-F-Me-F-F-F-F-Me-Me-Me-Me-
Me-Me-Me-Me-Me,
or
ia-ia-Me-Me-Me-Me-Me-Me-F-Me-F-F-F-F-Me-Me-Me-
Me-Me-Me-Me-Me-Me,
or
ia-ia-Me-Me-Me-Me-Me-Me-Me-Me-F-F-F-Me-Me-Me-Me-
Me -Me-Me-Me-Me-Me,
or
ia-ia-Me-Me-Me-Me-Me-Me-F-Me-F-F-F-Me-Me-Me-Me-
Me-Me-Me-Me-Me-Me,
or
Me-Me-Me-Me-Me-Me-F-F-F-F-F-Me-Me-Me-Me-Me-Me-Me-
F-Me-Me-ia-ia,
or
Me-Me-Me-Me-Me-F-F-Me-F-F-F-F-Me-Me-Me-Me-Me-Me-
Me-Me-Me-ia-ia,
or
Me-Me-Me-Me-Me-Me-F-Me-F-F-F-F-Me-Me-Me-Me-Me-
Me-Me-Me-Me-ia-ia,
or
Me-Me-Me-Me-Me-Me-Me-Me-F-F-F-Me-Me-Me-Me-Me-Me-
Me-Me-Me-Me-ia-ia,
or
Me-Me-Me-Me-Me-Me-F-Me-F-F-F-Me-Me-Me-Me-Me-Me-
Me-Me-Me-Me-ia-ia,
wherein ia represents an inverted abasic nucleoside, and when the inverted abasic nucleosides as represented by ia-ia are present at the 3′ terminus of the second strand, said inverted abasic nucleosides are present in a 2 nucleoside overhang.

58. A nucleic acid according to claim 54, wherein said modified nucleosides of said second strand comprise a modification pattern according to any one of the following (5′-3′):
ia-ia-(Me)₈-(F)₃-(Me)₁₀,
wherein ia represents an inverted abasic nucleoside.

59. A nucleic acid according to claim 53, wherein said modified nucleosides of said second strand comprise a modification pattern according to any one of the following (5′-3′):
ia-ia-Me(s)Me(s)Me-Me-Me-Me-F-F-F-F-F-Me-Me-Me-
Me-Me-Me-Me-F-Me-Me,
or
ia-ia-Me(s)Me(s)Me-Me-Me-F-F-Me-F-F-F-F-Me-Me-Me-
Me-Me-Me-Me-Me-Me,
or
ia-ia-Me(s)Me(s)Me-Me-Me-Me-F-Me-F-F-F-F-Me-Me-
Me-Me-Me-Me-Me-Me-Me,
or
ia-ia-Me(s)Me(s)Me-Me-Me-Me-Me-Me-F-F-F-Me-Me-Me-
Me-Me-Me-Me-Me-Me-Me,
or
ia-ia-Me(s)Me(s)Me-Me-Me-Me-F-Me-F-F-F-Me-Me-Me-
Me-Me-Me-Me-Me-Me-Me,
or
Me-Me-Me-Me-Me-Me-F-F-F-F-F-Me-Me-Me-Me-Me-Me-Me-
F(s)Me(s)Me-ia-ia,
or
Me-Me-Me-Me-Me-F-F-Me-F-F-F-F-Me-Me-Me-Me-Me-Me-
Me(s)Me(s)Me-ia-ia,
or
Me-Me-Me-Me-Me-Me-F-Me-F-F-F-F-Me-Me-Me-Me-Me-Me-
Me-Me(s)Me(s)Me-ia-ia,
or
Me-Me-Me-Me-Me-Me-Me-Me-F-F-F-Me-Me-Me-Me-Me-Me-
Me-Me(s)Me(s)Me-ia-ia,
or
Me-Me-Me-Me-Me-Me-F-Me-F-F-F-Me-Me-Me-Me-Me-Me-
Me-Me(s)Me(s)Me-ia-ia,
wherein:
(s) is a phosphorothioate internucleoside linkage,
ia represents an inverted abasic nucleoside, and when the inverted abasic nucleosides as represented by ia-ia are present at the 3′ terminus of the second strand, said inverted abasic nucleosides are present in a 2 nucleoside overhang.

60. A nucleic acid according to claim 54, wherein said modified nucleosides of said second strand comprise a modification pattern according to any one of the following (5′-3′):
ia-ia-Me(s)Me(s)(Me)₆-(F)₃-(Me)₁₀,
wherein:
(s) is a phosphorothioate internucleoside linkage, and
ia represents an inverted abasic nucleoside.

61. A nucleic acid according to claim 33, wherein said modified nucleosides comprise any one of the following modification patterns:
Modification pattern 1:
Second strand (5′-3′):
Me-Me-Me-Me-Me-Me-F-F-F-F-F-Me-Me-Me-Me-Me-Me-Me-
F-Me-Me,
First strand (5′-3′):
Me-F-Me-F-Me-F-Me-F-F-Me-Me-Me-Me-F-Me-F-Me-Me-
Me-Me-Me-Me-Me
Or
Modification pattern 2:
Second strand (5′-3′):
Me-Me-Me-Me-Me-F-F-Me-F-F-F-F-Me-Me-Me-Me-Me-
Me-Me-Me-Me,
First strand (5′-3′):
Me-F-Me-F-Me-F-Me-F-F-Me-Me-Me-Me-F-Me-F-Me-Me-
Me-Me-Me-Me-Me
Or
Modification pattern 3:
Second strand (5′-3′):
Me-Me-Me-Me-Me-Me-F-Me-F-F-F-F-Me-Me-Me-Me-Me-
Me-Me-Me-Me,
First strand (5′-3′):
Me-F-Me-F-Me-F-Me-F-F-Me-Me-Me-Me-F-Me-F-Me-Me-
Me-Me-Me-Me-Me
Or
Modification pattern 4:
Second strand (5′-3′):
Me-Me-Me-Me-Me-Me-F-Me-F-F-F-F-Me-Me-Me-Me-Me-
Me-Me-Me-Me,
First strand (5′-3′):
Me-F-Me-F-Me-F-Me-Me-Me-Me-Me-Me-Me-F-Me-F-
Me-Me-Me-Me-Me-Me-Me
Or
Modification pattern 5:
Second strand (5′-3′):
Me-Me-Me-Me-Me-Me-Me-Me-F-F-F-Me-Me-Me-Me-Me-
Me-Me-Me-Me-Me,
First strand (5′-3′):
Me-F-Me-Me-Me-F-Me-Me-F-Me-Me-Me-Me-F-Me-F-Me-
Me-Me-Me-Me-Me-Me
Or
Modification pattern 6:
Second strand (5′-3′):
Me-Me-Me-Me-Me-Me-F-Me-F-F-F-Me-Me-Me-Me-Me-Me-
Me-Me-Me-Me,
First strand (5′-3′):
Me-F-Me-Me-Me-F-Me-Me-F-Me-Me-Me-Me-F-Me-F-
Me-Me-Me-Me-Me-Me-Me.

62. A nucleic acid according to claim 33, wherein said modified nucleosides comprise any one of the following modification patterns:
Modification pattern 1:
Second strand (5′-3′):
Me-Me-Me-Me-Me-Me-Me-Me-F-F-F-Me-Me-Me-Me-
Me-Me-Me-Me-Me-Me,
First strand (5′-3′):
Me-F-Me-Me-Me-X₁-Me-Me-Me-Me-Me-Me-Me-F-Me-F-
Me-Me-Me-Me-Me-Me-Me, wherein X₁ is a thermally
destabilising modification;
Or
Modification pattern 2:
Second strand (5′-3′):
Me-Me-Me-Me-Me-Me-Me-Me-F-F-F-Me-Me-Me-Me-Me-
Me-Me-Me-Me-Me,
First strand (5′-3′):
Me-F-Me-F-Me-F-Me-Me-Me-Me-Me-Me-Me-F-Me-F-
Me-Me-Me-Me-Me-Me-Me;
Or
Modification pattern 3:
Second strand (5′-3′):
Me-Me-Me-Me-Me-Me-Me-Me-F-F-F-Me-Me-Me-Me-
Me-Me-Me-Me-Me-Me,
First strand (5′-3′):
Me-F-Me-Me-Me-F-Me-Me-Me-Me-Me-Me-Me-F-Me-F-
Me-F-Me-Me-Me-Me-Me;
Or
Modification nattern 4.
Second strand (5′-3′):
Me-Me-Me-Me-Me-Me-Me-Me-F-F-F-Me-Me-Me-Me-
Me-Me-Me-Me-Me-Me,
First strand (5′-3′):
Me-F-Me-Me-Me-F-Me-Me-Me-Me-Me-Me-Me-F-Me-F-
Me-Me-Me-F-Me-Me-Me;
Or
Modification pattern 5:
Second strand (5′-3′):
Me-Me-Me-Me-Me-Me-Me-Me-F-F-F-Me-Me-Me-Me-
Me-Me-Me-Me-Me-Me,
First strand (5′-3′):
Me-F-Me-Me-Me-X₁-Me-F-F-Me-Me-Me-Me-F-Me-F-Me-
Me-Me-Me-Me-Me-Me, wherein X₁ is a thermally
destabilising modification;
Or
Modification pattern 6:
Second strand (5′-3′):
Me-Me-Me-Me-Me-Me-Me-Me-F-F-F-Me-Me-Me-Me-Me-
Me-Me-Me-Me-Me,
First strand (5′-3′):
Me-F-Me-F-Me-F-Me-F-F-Me-Me-Me-Me-F-Me-F-Me-Me-
Me-Me-Me-Me-Me;
Or
Modification pattern 7:
Second strand (5′-3′):
Me-Me-Me-Me-Me-Me-Me-Me-F-F-F-Me-Me-Me-Me-Me-
Me-Me-Me-Me-Me,
First strand (5′-3′):
Me-F-Me-Me-Me-F-Me-F-F-Me-Me-Me-Me-F-Me-F-Me-
F-Me-Me-Me-Me-Me;
Or
Modification pattern 8:
Second strand (5′-3′):
Me-Me-Me-Me-Me-Me-Me-Me-F-F-F-Me-Me-Me-Me-
Me-Me-Me-Me-Me-Me,
First strand (5′-3′):
Me-F-Me-Me-Me-F-Me-F-F-Me-Me-Me-Me-F-Me-F-Me-
Me-Me-F-Me-Me-Me.

63. A nucleic acid according to claim 61, wherein said modified nucleosides comprise any one of the following modification patterns:
Modification pattern 1:
Second strand (5′-3′):
Me(s)Me(s)Me-Me-Me-Me-F-F-F-F-F-Me-Me-Me-
Me-Me-Me-Me-F-Me-Me,
First strand (5′-3′):
Me(s)F(s)Me-F-Me-F-Me-F-F-Me-Me-Me-Me-F-Me-
F-Me-Me-Me-Me-Me(s)Me(s)Me
Or
Modification pattern 2:
Second strand (5′-3′):
Me(s)Me(s)Me-Me-Me-F-F-Me-F-F-F-F-Me-Me-
Me-Me-Me-Me-Me-Me-Me,
First strand (5′-3′):
Me(s)F(s)Me-F-Me-F-Me-F-F-Me-Me-Me-Me-F-Me-
F-Me-Me-Me-Me-Me(s)Me(s)Me
Or
Modification pattern 3:
Second strand (5′-3′):
Me(s)Me(s)Me-Me-Me-Me-F-Me-F-F-F-F-Me-Me-
Me-Me-Me-Me-Me-Me-Me,
First strand (5′-3′):
Me(s)F(s)Me-F-Me-F-Me-F-F-Me-Me-Me-Me-F-Me-
F-Me-Me-Me-Me-Me(s)Me(s)Me
Or
Modification pattern 4:
Second strand (5′-3′):
Me(s)Me(s)Me-Me-Me-Me-F-Me-F-F-F-F-Me-Me-
Me-Me-Me-Me-Me-Me-Me,
First strand (5′-3′):
Me(s)F(s)Me-F-Me-F-Me-Me-Me-Me-Me-Me-Me-F-
Me-F-Me-Me-Me-Me-Me(s)Me(s)Me
Or
Modification pattern 5:
Second strand (5′-3′):
Me(s)Me(s)Me-Me-Me-Me-Me-Me-F-F-F-Me-Me-
Me-Me-Me-Me-Me-Me-Me-Me,
First strand (5′-3′):
Me(s)F(s)Me-Me-Me-F-Me-Me-F-Me-Me-Me-Me-F-
Me-F-Me-Me-Me-Me-Me(s)Me(s)Me
Or
Modification pattern 6:
Second strand (5′-3′):
Me(s)Me(s)Me-Me-Me-Me-F-Me-F-F-F-Me-Me-
Me-Me-Me-Me-Me-Me-Me-Me,
First strand (5′-3′):
Me(s)F(s)Me-Me-Me-F-Me-Me-F-Me-Me-Me-Me-F-
Me-F-Me-Me-Me-Me-Me(s)Me(s)Me
wherein (s) is a phosphorothioate internucleoside
linkage.

64. A nucleic acid according to claim 62, wherein said modified nucleosides comprise any one of the following modification patterns:
Modification pattern 1:
Second strand (5′-3′):
Me(s)Me(s)Me-Me-Me-Me-Me-Me-F-F-F-Me-
Me-Me-Me-Me-Me-Me-Me-Me-Me,
First strand (5′-3′):
Me(s)F(s)Me-Me-Me-X₁-Me-Me-Me-Me-Me-Me-Me-F-
Me-F-Me-Me-Me-Me-Me(s)Me(s)Me, wherein X₁ is
a thermally destabilising modification;
Or
Modification pattern 2:
Second strand (5′-3′):
Me(s)Me(s)Me-Me-Me-Me-Me-Me-F-F-F-Me-
Me-Me-Me-Me-Me-Me-Me-Me-Me,
First strand (5′-3′):
Me(s)F(s)Me-F-Me-F-Me-Me-Me-Me-Me-Me-Me-
F-Me-F-Me-Me-Me-Me-Me(s)Me(s)Me,
Or
Modification pattern 3:
Second strand (5′-3′):
Me(s)Me(s)Me-Me-Me-Me-Me-Me-F-F-F-Me-
Me-Me-Me-Me-Me-Me-Me-Me-Me,
First strand (5′-3′):
Me(s)F(s)Me-Me-Me-F-Me-Me-Me-Me-Me-Me-Me-
F-Me-F-Me-F-Me-Me-Me(s)Me(s)Me;
Or
Modification pattern 4:
Second strand (5′-3′):
Me(s)Me(s)Me-Me-Me-Me-Me-Me-F-F-F-Me-
Me-Me-Me-Me-Me-Me-Me-Me-Me,
First strand (5′-3′):
Me(s)F(s)Me-Me-Me-F-Me-Me-Me-Me-Me-Me-Me-
F-Me-F-Me-Me-Me-F-Me(s)Me(s)Me;
Or
Modification pattern 5:
Second strand (5′-3′):
Me(s)Me(s)Me-Me-Me-Me-Me-Me-F-F-F-Me-
Me-Me-Me-Me-Me-Me-Me-Me-Me,
First strand (5′-3′):
Me(s)F(s)Me-Me-Me-X₁-Me-F-F-Me-Me-Me-Me-
F-Me-F-Me-Me-Me-Me-Me(s)Me(s)Me, wherein X₁ is a
thermally destabilising modification;
Or
Modification pattern 6:
Second strand (5′-3′):
Me(s)Me(s)Me-Me-Me-Me-Me-Me-F-F-F-Me-
Me-Me-Me-Me-Me-Me-Me-Me-Me,
First strand (5′-3′):
Me(s)F(s)Me-F-Me-F-Me-F-F-Me-Me-Me-Me-F-
Me-F-Me-Me-Me-Me-Me(s)Me(s)Me,
Or
Modification pattern 7:
Second strand (5′-3′):
Me(s)Me(s)Me-Me-Me-Me-Me-Me-F-F-F-Me-
Me-Me-Me-Me-Me-Me-Me-Me-Me,
First strand (5′-3′):
Me(s)F(s)Me-Me-Me-F-Me-F-F-Me-Me-Me-Me-
F-Me-F-Me-F-Me-Me-Me(s)Me(s)Me,
Or
Modification pattern 8:
Second strand (5′-3′):
Me(s)Me(s)Me-Me-Me-Me-Me-Me-F-F-F-Me-Me-Me-
Me-Me-Me-Me-Me-Me-Me,
First strand (5′-3′):
Me(s)F(s)Me-Me-Me-F-Me-F-F-Me-Me-Me-Me-
F-Me-F-Me-Me-Me-F-Me(s)Me(s)Me;
wherein (s) is a phosphorothioate internucleoside
linkage.

65. A nucleic acid according to claim 61, wherein said modified nucleosides comprise any one of the following modification patterns:
Modification pattern 1:
Second strand (5′-3′):
Me-Me-Me-Me-Me-Me-F-F-F-F-F-Me-Me-Me-Me-Me-
Me-Me-F(s)Me(s)Me,
First strand (5′-3′):
Me(s)F(s)Me-F-Me-F-Me-F-F-Me-Me-Me-Me-F-Me-
F-Me-Me-Me-Me-Me(s)Me(s)Me
Or
Modification pattern 2:
Second strand (5′-3′):
Me-Me-Me-Me-Me-F-F-Me-F-F-F-F-Me-Me-Me-Me-Me-
Me-Me(s)Me(s)Me,
First strand (5′-3′):
Me(s)F(s)Me-F-Me-F-Me-F-F-Me-Me-Me-Me-F-Me-F-Me-
Me-Me-Me-Me(s)Me(s)Me
Or
Modification pattern 3:
Second strand (5′-3′):
Me-Me-Me-Me-Me-Me-F-Me-F-F-F-F-Me-Me-Me-Me-Me-
Me-Me(s)Me(s)Me,
First strand (5′-3′):
Me(s)F(s)Me-F-Me-F-Me-F-F-Me-Me-Me-Me-F-Me-
F-Me-Me-Me-Me-Me(s)Me(s)Me
Or
Modification pattern 4:
Second strand (5′-3′):
Me-Me-Me-Me-Me-Me-F-Me-F-F-F-F-Me-Me-Me-Me-Me-
Me-Me(s)Me(s)Me,
First strand (5′-3′):
Me(s)F(s)Me-F-Me-F-Me-Me-Me-Me-Me-Me-Me-F-
Me-F-Me-Me-Me-Me-Me(s)Me(s)Me
Or
Modification pattern 5:
Second strand (5′-3′):
Me-Me-Me-Me-Me-Me-Me-Me-F-F-F-Me-Me-Me-Me-Me-
Me-Me-Me(s)Me(s)Me,
First strand (5′-3′):
Me(s)F(s)Me-Me-Me-F-Me-Me-F-Me-Me-Me-Me-F-Me-F-
Me-Me-Me-Me-Me(s)Me(s)Me
Or
Modification pattern 6:
Second strand (5′-3′):
Me-Me-Me-Me-Me-Me-F-Me-F-F-F-Me-Me-Me-Me-Me-
Me-Me-Me(s)Me(s)Me,
First strand (5′-3′):
Me(s)F(s)Me-Me-Me-F-Me-Me-F-Me-Me-Me-Me-F-
Me-F-Me-Me-Me-Me-Me(s)Me(s)Me
wherein (s) is a phosphorothioate internucleoside
linkage.

66. A nucleic acid according to claim 61, wherein said modified nucleosides comprise any one of the following modification patterns:
Modification pattern 1:
Second strand (5′-3′):
ia-ia-Me-Me-Me-Me-Me-Me-F-F-F-F-F-Me-
Me-Me-Me-Me-Me-Me-F-Me-Me,
First strand (5′-3′):
Me-F-Me-F-Me-F-Me-F-F-Me-Me-Me-Me-F-Me-
F-Me-Me-Me-Me-Me-Me-Me
Or
Modification pattern 2:
Second strand (5′-3′):
ia-ia-Me-Me-Me-Me-Me-F-F-Me-F-F-F-F-Me-
Me-Me-Me-Me-Me-Me-Me-Me,
First strand (5′-3′):
Me-F-Me-F-Me-F-Me-F-F-Me-Me-Me-Me-F-Me-
F-Me-Me-Me-Me-Me-Me-Me
Or
Modification pattern 3:
Second strand (5′-3′):
ia-ia-Me-Me-Me-Me-Me-Me-F-Me-F-F-F-F-Me-
Me-Me-Me-Me-Me-Me-Me-Me,
First strand (5′-3′):
Me-F-Me-F-Me-F-Me-F-F-Me-Me-Me-Me-F-Me-
F-Me-Me-Me-Me-Me-Me-Me
Or
Modification pattern 4:
Second strand (5′-3′):
ia-ia-Me-Me-Me-Me-Me-Me-F-Me-F-F-F-F-
Me-Me-Me-Me-Me-Me-Me-Me-Me,
First strand (5′-3′):
Me-F-Me-F-Me-F-Me-Me-Me-Me-Me-Me-Me-F-
Me-F-Me-Me-Me-Me-Me-Me-Me
Or
Modification pattern 5:
Second strand (5′-3′):
ia-ia-Me-Me-Me-Me-Me-Me-Me-Me-F-F-F-Me-
Me-Me-Me-Me-Me-Me-Me-Me-Me,
First strand (5′-3′):
Me-F-Me-Me-Me-F-Me-Me-F-Me-Me-Me-Me-F-
Me-F-Me-Me-Me-Me-Me-Me-Me
Or
Modification pattern 6:
Second strand (5′-3′):
ia-ia-Me-Me-Me-Me-Me-Me-F-Me-F-F-F-Me-
Me-Me-Me-Me-Me-Me-Me-Me-Me
First strand (5′-3′):
Me-F-Me-Me-Me-F-Me-Me-F-Me-Me-Me-Me-F-
Me-F-Me-Me-Me-Me-Me-Me-Me,
wherein ia represents an inverted abasic
nucleoside.

67. A nucleic acid according to claim 62, wherein said modified nucleosides comprise any one of the following modification patterns:
Modification pattern 1:
Second strand (5′-3′):
ia-ia-Me-Me-Me-Me-Me-Me-Me-Me-F-F-F-
Me-Me-Me-Me-Me-Me-Me-Me-Me-Me,
First strand (5′-3′):
Me-F-Me-Me-Me-X₁-Me-Me-Me-Me-Me-Me-
Me-F-Me-F-Me-Me-Me-Me-Me-Me-Me, wherein X₁ is a
thermally destabilising modification;
Or
Modification pattern 2:
Second strand (5′-3′):
ia-ia-Me-Me-Me-Me-Me-Me-Me-Me-F-F-F-
Me-Me-Me-Me-Me-Me-Me-Me-Me-Me,
First strand (5′-3′):
Me-F-Me-F-Me-F-Me-Me-Me-Me-Me-Me-Me-
F-Me-F-Me-Me-Me-Me-Me-Me-Me,
Or
Modification pattern 3:
Second strand (5′-3′):
ia-ia-Me-Me-Me-Me-Me-Me-Me-Me-F-F-F-
Me-Me-Me-Me-Me-Me-Me-Me-Me-Me,
First strand (5′-3′):
Me-F-Me-Me-Me-F-Me-Me-Me-Me-Me-Me-
Me-F-Me-F-Me-F-Me-Me-Me-Me-Me;
Or
Modification pattern 4:
Second strand (5′-3′):
ia-ia-Me-Me-Me-Me-Me-Me-Me-Me-F-F-F-
Me-Me-Me-Me-Me-Me-Me-Me-Me-Me,
First strand (5′-3′):
Me-F-Me-Me-Me-F-Me-Me-Me-Me-Me-Me-Me-
F-Me-F-Me-Me-Me-F-Me-Me-Me;
Or
Modification pattern 5:
Second strand (5′-3′):
ia-ia-Me-Me-Me-Me-Me-Me-Me-Me-F-F-F-
Me-Me-Me-Me-Me-Me-Me-Me-Me-Me,
First strand (5′-3′):
Me-F-Me-Me-Me-X₁-Me-F-F-Me-Me-Me-Me-
F-Me-F-Me-Me-Me-Me-Me-Me-Me, wherein X₁ is a
thermally destabilising modification;
Or
Modification pattern 6:
Second strand (5′-3′):
ia-ia-Me-Me-Me-Me-Me-Me-Me-Me-F-F-F-
Me-Me-Me-Me-Me-Me-Me-Me-Me-Me,
First strand (5′-3′):
Me-F-Me-F-Me-F-Me-F-F-Me-Me-Me-Me-F-
Me-F-Me-Me-Me-Me-Me-Me-Me;
Or
Modification pattern 7:
Second strand (5′-3′):
ia-ia-Me-Me-Me-Me-Me-Me-Me-Me-F-F-F-
Me-Me-Me-Me-Me-Me-Me-Me-Me-Me,
First strand (5′-3′):
Me-F-Me-Me-Me-F-Me-F-F-Me-Me-Me-Me-F-
Me-F-Me-F-Me-Me-Me-Me-Me;
Or
Modification pattern 8:
Second strand (5′-3′):
ia-ia-Me-Me-Me-Me-Me-Me-Me-Me-F-F-F-
Me-Me-Me-Me-Me-Me-Me-Me-Me-Me,
First strand (5′-3′):
Me-F-Me-Me-Me-F-Me-F-F-Me-Me-Me-Me-F-
Me-F-Me-Me-Me-F-Me-Me-Me,
wherein ia represents an inverted abasic
nucleoside.

68. A nucleic acid according to claim 61, wherein said modified nucleosides comprise any one of the following modification patterns:
Modification pattern 1:
Second strand (5′-3′):
Me-Me-Me-Me-Me-Me-F-F-F-F-F-Me-Me-Me-
Me-Me-Me-Me-F-Me-Me-ia-ia,
First strand (5′-3′):
Me-F-Me-F-Me-F-Me-F-F-Me-Me-Me-Me-F-Me-
F-Me-Me-Me-Me-Me-Me-Me
Or
Modification pattern 2:
Second strand (5′-3′):
Me-Me-Me-Me-Me-F-F-Me-F-F-F-F-Me-Me-
Me-Me-Me-Me-Me-Me-Me-ia-ia,
First strand (5′-3′):
Me-F-Me-F-Me-F-Me-F-F-Me-Me-Me-Me-F-Me-
F-Me-Me-Me-Me-Me-Me-Me
Or
Modification pattern 3:
Second strand (5′-3′):
Me-Me-Me-Me-Me-Me-F-Me-F-F-F-F-Me-Me-
Me-Me-Me-Me-Me-Me-Me-ia-ia,
First strand (5′-3′):
Me-F-Me-F-Me-F-Me-F-F-Me-Me-Me-Me-F-Me-
F-Me-Me-Me-Me-Me-Me-Me
Or
Modification pattern 4:
Second strand (5′-3′):
Me-Me-Me-Me-Me-Me-F-Me-F-F-F-F-Me-Me-
Me-Me-Me-Me-Me-Me-Me-ia-ia,
First strand (5′-3′):
Me-F-Me-F-Me-F-Me-Me-Me-Me-Me-Me-Me-F-
Me-F-Me-Me-Me-Me-Me-Me-Me
Or
Modification pattern 5:
Second strand (5′-3′):
Me-Me-Me-Me-Me-Me-Me-Me-F-F-F-Me-Me-
Me-Me-Me-Me-Me-Me-Me-Me-ia-ia,
First strand (5′-3′):
Me-F-Me-Me-Me-F-Me-Me-F-Me-Me-Me-Me-F-
Me-F-Me-Me-Me-Me-Me-Me-Me
Or
Modification pattern 6:
Second strand (5′-3′):
Me-Me-Me-Me-Me-Me-F-Me-F-F-F-Me-Me-Me-
Me-Me-Me-Me-Me-Me-Me-ia-ia
First strand (5′-3′):
Me-F-Me-Me-Me-F-Me-Me-F-Me-Me-Me-Me-F-
Me-F-Me-Me-Me-Me-Me-Me-Me,
wherein ia represents an inverted abasic nucleoside, and when the inverted abasic nucleosides as represented by ia-ia are present at the 3′ terminus of the second strand, said inverted abasic nucleosides are present in a 2 nucleoside overhang.

69. A nucleic acid according to claim 61, wherein said modified nucleosides comprise any one of the following modification patterns:
Modification pattern 1:
Second strand (5′-3′):
ia-ia-Me(s)Me(s)Me-Me-Me-Me-F-F-F-F-F-Me-
Me-Me-Me-Me-Me-Me-F-Me-Me,
First strand (5′-3′):
Me(s)F(s)Me-F-Me-F-Me-F-F-Me-Me-Me-Me-F-Me-
F-Me-Me-Me-Me-Me(s)Me(s)Me
Or
Modification pattern 2:
Second strand (5′-3′):
ia-ia-Me(s)Me(s)Me-Me-Me-F-F-Me-F-F-F-F-Me-
Me-Me-Me-Me-Me-Me-Me-Me,
First strand (5′-3′):
Me(s)F(s)Me-F-Me-F-Me-F-F-Me-Me-Me-Me-F-Me-
F-Me-Me-Me-Me-Me(s)Me(s)Me
Or
Modification pattern 3:
Second strand (5′-3′):
ia-ia-Me(s)Me(s)Me-Me-Me-Me-F-Me-F-F-F-F-
Me-Me-Me-Me-Me-Me-Me-Me-Me,
First strand (5′-3′):
Me(s)F(s)Me-F-Me-F-Me-F-F-Me-Me-Me-Me-F-Me-
F-Me-Me-Me-Me-Me(s)Me(s)Me
Or
Modification pattern 4:
Second strand (5′-3′):
ia-ia-Me(s)Me(s)Me-Me-Me-Me-F-Me-F-F-F-F-
Me-Me-Me-Me-Me-Me-Me-Me-Me,
First strand (5′-3′):
Me(s)F(s)Me-F-Me-F-Me-Me-Me-Me-Me-Me-Me-F-
Me-F-Me-Me-Me-Me-Me(s)Me(s)Me
Or
Modification pattern 5:
Second strand (5′-3′):
ia-ia-Me(s)Me(s)Me-Me-Me-Me-Me-Me-F-F-F-Me-
Me-Me-Me-Me-Me-Me-Me-Me-Me,
First strand (5′-3′):
Me(s)F(s)Me-Me-Me-F-Me-Me-F-Me-Me-Me-Me-F-
Me-F-Me-Me-Me-Me-Me(s)Me(s)Me
Or
Modification pattern 6:
Second strand (5′-3′):
ia-ia-Me(s)Me(s)Me-Me-Me-Me-F-Me-F-F-F-Me-
Me-Me-Me-Me-Me-Me-Me-Me-Me,
First strand (5′-3′):
Me(s)F(s)Me-Me-Me-F-Me-Me-F-Me-Me-Me-Me-F-
Me-F-Me-Me-Me-Me-Me(s)Me(s)Me
wherein:
(s) is a phosphorothioate internucleoside linkage,
ia represents an inverted abasic nucleoside.

70. A nucleic acid according to claim 62, wherein said modified nucleosides comprise any one of the following modification patterns:
Modification pattern 1:
Second strand (5′-3′):
ia-ia-Me(s)Me(s)Me-Me-Me-Me-Me-Me-F-F-F-
Me-Me-Me-Me-Me-Me-Me-Me-Me-Me,
First strand (5′-3′):
Me(s)F(s)Me-Me-Me-X₁-Me-Me-Me-Me-Me-Me-
Me-F-Me-F-Me-Me-Me-Me-Me(s)Me(s)Me, wherein X₁ is
a thermally destabilising modification;
Or
Modification pattern 2:
Second strand (5′-3′):
ia-ia-Me(s)Me(s)Me-Me-Me-Me-Me-Me-F-F-F-
Me-Me-Me-Me-Me-Me-Me-Me-Me-Me,
First strand (5′-3′):
Me(s)F(s)Me-F-Me-F-Me-Me-Me-Me-Me-Me-Me-
F-Me-F-Me-Me-Me-Me-Me(s)Me(s)Me,
Or
Modification pattern 3:
Second strand (5′-3′):
ia-ia-Me(s)Me(s)Me-Me-Me-Me-Me-Me-F-F-F-
Me-Me-Me-Me-Me-Me-Me-Me-Me-Me,
First strand (5′-3′):
Me(s)F(s)Me-Me-Me-F-Me-Me-Me-Me-Me-Me-Me-
F-Me-F-Me-F-Me-Me-Me(s)Me(s)Me;
Or
Modification pattern 4:
Second strand (5′-3′):
ia-ia-Me(s)Me(s)Me-Me-Me-Me-Me-Me-F-F-F-
Me-Me-Me-Me-Me-Me-Me-Me-Me-Me,
First strand (5′-3′):
Me(s)F(s)Me-Me-Me-F-Me-Me-Me-Me-Me-Me-Me-
F-Me-F-Me-Me-Me-F-Me(s)Me(s)Me;
Or
Modification pattern 5:
Second strand (5′-3′):
ia-ia-Me(s)Me(s)Me-Me-Me-Me-Me-Me-F-F-F-
Me-Me-Me-Me-Me-Me-Me-Me-Me-Me,
First strand (5′-3′):
Me(s)F(s)Me-Me-Me-X₁-Me-F-F-Me-Me-Me-Me-
F-Me-F-Me-Me-Me-Me-Me(s)Me(s)Me, wherein X₁ is a
thermally destabilising modification;
Or
Modification pattern 6:
Second strand (5′-3′):
ia-ia-Me(s)Me(s)Me-Me-Me-Me-Me-Me-F-F-F-
Me-Me-Me-Me-Me-Me-Me-Me-Me-Me,
First strand (5′-3′):
Me(s)F(s)Me-F-Me-F-Me-F-F-Me-Me-Me-Me-F-
Me-F-Me-Me-Me-Me-Me(s)Me(s)Me;
Or
Modification pattern 7:
Second strand (5′-3′):
ia-ia-Me(s)Me(s)Me-Me-Me-Me-Me-Me-F-F-F-
Me-Me-Me-Me-Me-Me-Me-Me-Me-Me,
First strand (5′-3′):
Me(s)F(s)Me-Me-Me-F-Me-F-F-Me-Me-Me-Me-
F-Me-F-Me-F-Me-Me-Me(s)Me(s)Me,
Or
Modification pattern 8:
Second strand (5′-3′):
ia-ia-Me(s)Me(s)Me-Me-Me-Me-Me-Me-F-F-F-
Me-Me-Me-Me-Me-Me-Me-Me-Me-Me,
First strand (5′-3′):
Me(s)F(s)Me-Me-Me-F-Me-F-F-Me-Me-Me-Me-
F-Me-F-Me-Me-Me-F-Me(s)Me(s)Me;
wherein:
(s) is a phosphorothioate internucleoside linkage,
ia represents an inverted abasic nucleoside.

71. A nucleic acid according to claim 61, wherein said modified nucleosides comprise any one of the following modification patterns:
Modification pattern 1:
Second strand (5′-3′):
Me-Me-Me-Me-Me-Me-F-F-F-F-F-Me-Me-Me-
Me-Me-Me-Me-F(s)Me(s)Me-ia-ia,
First strand (5′-3′):
Me(s)F(s)Me-F-Me-F-Me-F-F-Me-Me-Me-Me-F-Me-
F-Me-Me-Me-Me-Me(s)Me(s)Me
Or
Modification pattern 2:
Second strand (5′-3′):
Me-Me-Me-Me-Me-F-F-Me-F-F-F-F-Me-Me-
Me-Me-Me-Me-Me(s)Me(s)Me-ia-ia,
First strand (5′-3′):
Me(s)F(s)Me-F-Me-F-Me-F-F-Me-Me-Me-Me-F-Me-
F-Me-Me-Me-Me-Me(s)Me(s)Me
Or
Modification pattern 3:
Second strand (5′-3′):
Me-Me-Me-Me-Me-Me-F-Me-F-F-F-F-Me-Me-
Me-Me-Me-Me-Me(s)Me(s)Me-ia-ia,
First strand (5′-3′):
Me(s)F(s)Me-F-Me-F-Me-F-F-Me-Me-Me-Me-F-Me-
F-Me-Me-Me-Me-Me(s)Me(s)Me
Or
Modification pattern 4:
Second strand (5′-3′):
Me-Me-Me-Me-Me-Me-F-Me-F-F-F-F-Me-Me-
Me-Me-Me-Me-Me(s)Me(s)Me-ia-ia,
First strand (5′-3′):
Me(s)F(s)Me-F-Me-F-Me-Me-Me-Me-Me-Me-Me-F-
Me-F-Me-Me-Me-Me-Me(s)Me(s)Me
Or
Modification pattern 5:
Second strand (5′-3′):
Me-Me-Me-Me-Me-Me-Me-Me-F-F-F-Me-Me-
Me-Me-Me-Me-Me-Me(s)Me(s)Me-ia-ia,
First strand (5′-3′):
Me(s)F(s)Me-Me-Me-F-Me-Me-F-Me-Me-Me-Me-F-
Me-F-Me-Me-Me-Me-Me(s)Me(s)Me
Or
Modification pattern 6:
Second strand (5′-3′):
Me-Me-Me-Me-Me-Me-F-Me-F-F-F-Me-Me-Me-
Me-Me-Me-Me-Me(s)Me(s)Me-ia-ia,
First strand (5′-3′):
Me(s)F(s)Me-Me-Me-F-Me-Me-F-Me-Me-Me-Me-F-
Me-F-Me-Me-Me-Me-Me(s)Me(s)Me
wherein:
(s) is a phosphorothioate internucleoside linkage,
ia represents an inverted abasic nucleoside, and when the inverted abasic nucleosides as represented by ia-ia are present at the 3′ terminus of the second strand, said inverted abasic nucleosides are present in a 2 nucleoside overhang.

72. A nucleic acid according to any preceding claim, wherein the nucleic acid is conjugated directly or indirectly to one or more ligand moieties, optionally wherein said ligand moiety is present at a terminal region of the second strand, preferably at the 3′ terminal region thereof.

73. A nucleic acid according to claim 72, wherein the ligand moiety comprises:
(i) one or more N-acetyl galactosamine (GalNAc) ligands, and/or
(ii) one or more N-acetyl galactosamine (GalNAc) ligand derivatives, and/or
(iii) one or more N-acetyl galactosamine (GalNAc) ligands and/or derivatives thereof, conjugated to the nucleic acid through a linker.

74. A nucleic acid according to claim 73, wherein said one or more GalNAc ligands and/or GalNAc ligand derivatives are conjugated directly or indirectly to the 5′ or 3′ terminal region of the second strand of the nucleic acid, preferably at the 3′ terminal region thereof.

75. A nucleic acid according to any one of claims 72 to 74, wherein the ligand moiety comprises the following structure:

[chemical structure]

76. A nucleic acid according to any one of claims 72 to 75, comprising the structure: [chemical structure]
wherein:
R₁ at each occurrence is independently selected from the group consisting of hydrogen, methyl and ethyl;
R₂ is selected from the group consisting of hydrogen, hydroxy, —OC₁₋₃alkyl, —C(═O)OC₁₋₃alkyl, halo and nitro;
X₁ and X₂ at each occurrence are independently selected from the group consisting of methylene, oxygen and sulfur;
m is an integer of from 1 to 6;
n is an integer of from 1 to 10;
q, r, s, t, v are independently integers from 0 to 4, with the proviso that:
(i) q and r cannot both be 0 at the same time; and
(ii) s, t and v cannot all be 0 at the same time;
Z is an oligonucleoside moiety.

77. A nucleic acid according to claim 76, comprising the structure [chemical structure]
wherein [oligonucleotide] represents the contiguous nucleosides of the second strand.

78. A nucleic acid according to any one of claims 72 to 75, comprising the structure: [chemical structure]
wherein:
r and s are independently an integer selected from 1 to 16; and
Z is an oligonucleoside moiety.

79. A nucleic acid according to claim 78, comprising the structure [chemical structure]
wherein [oligonucleotide] represents the contiguous nucleosides of the second strand.

80. A nucleic acid according to any one of claims 72 to 79, wherein the nucleic acid comprises the modification pattern:
Second strand (5′-3′):
ia-ia-Me(s)Me(s)Me-Me-Me-Me-F-Me-F-F-F-F-
Me-Me-Me-Me-Me-Me-Me-Me-Me,
First strand (5′-3′):
Me(s)F(s)Me-F-Me-F-Me-Me-Me-Me-Me-Me-Me-F-
Me-F-Me-Me-Me-Me-Me(s)Me(s)Me,
wherein:
(s) is a phosphorothioate internucleoside linkage,
ia represents an inverted abasic nucleoside
and wherein the nucleic acid is conjugated directly or indirectly to one or more ligand moieties, optionally wherein said ligand moiety is present at a terminal region of the second strand, preferably at the 3′ terminal region thereof.

81. A nucleic acid according to claim 80, wherein the second strand comprises the structure [chemical structure]
wherein [oligonucleotide] represents the contiguous nucleosides of the second strand, and
wherein the one or more ligand moieties are conjugated to the 3′ terminal region of the second strand via a linker.

82. The nucleic acid according to claim 80 or 81, wherein the first and second strands comprise, consist of, or consist essentially of a nucleoside sequence differing by 0 or 1 nucleosides from any one of the following first and second sequences:

| Modified first strand | Modified second strand |
|---|---|
| SEQ ID NO: 764 | SEQ ID NO: 774 |
| SEQ ID NO: 768 | SEQ ID NO: 778 |

83. The nucleic acid according to any one of claim 80 or 82, wherein the 2 consecutive inverted abasic nucleosides in the 5′ terminal region of the second strand present as the following 5′ terminal motif [chemical structure]
wherein:
T represents a 2′Me ribose modification,
B represents the nucleoside bases of the first two basic nucleosides in the 5′ terminal region of the second strand, and
Z represents the remaining 19 contiguous basic nucleosides of said second strand.

84. A pharmaceutical composition comprising a nucleic acid according to any preceding claim, in combination with a pharmaceutically acceptable excipient or carrier.

85. A nucleic acid or pharmaceutical composition according to any preceding claim, for use in therapy.

86. A nucleic acid or pharmaceutical composition according to any preceding claim, for use in prevention or treatment of a disease related to a disorder of haemostasis, such as a disease related to a disorder of haemostasis, such as haemophilia.

The application's sequence listing, which the Patent Office published only in electronic form, follows.

SEQUENCE LISTING (808 sequences)

SEQ ID NO: 1 - DNA, 20626 bp, Homo sapiens
  source 1..20626: mol_type = genomic DNA
ttgcgcttctagaatgcttccctctcaatgagaacagtagctccacgtggctgggaagttcaaagtggttttgacacagaaaagaggaagtaagtggactctatctttgatttgggatcctactcctgaccctgtgaacttcttggctccctcttgaggacgttggcttgaaagtggctctgtgggttctccctgctctctgacttctccgagcctgctggccactgtcttggctgagactgctctagtctccagaaaggagatctgctcactcctaagaagtatcaaggtcaggccaggtgtggtggctcacgcctgtaatcccagcactttgggaggccaagacaggcagatcaggaggtcaggagatcgagatcagcctggctaacacggtaaaaccccatctctactaaaaatacaaaaaattagccaggcgtggtggcacacacctgtagtcccaggtactcgggaggctgaagcaggagaatcgcttgaaaccaggaggccgaggttgcagtgagccaagattgcgccactgcactgcagcctgggcgacagagcgagacgccatttcaaaaaaaaaaaaaaatcaaggtcaggggggaagtgggaagactgaaatagataaaggattctaaagagatataacagtcaaatgcgacacatgaaaccctgaccagataaaaattaaaaacccataaaatacatgtttgaagtcatagagtaatctgacttggactagacatgtgatatatgtgaggcttgtgatcttcccaggagtgatggtagcacagcacagggcagagacccgtccatggaagaaacactggtgctagtgcccagggcagaagtgagtgatgtctttaagtggatatggaaaaatattaactattctacctaggttgtgggtgtatggatatttagtattcaattattccaatttctctgtgtatgtatacatattttttttagagacagggtctcactctgtcgaccacactggagtagggggtacaatcatagctcactgtacatactcaagtgatccttctgcctcagcctcctgagcagatgggactacaggtgtgcagcatcatggcccagtttttttttttttggtagagatgggttttgctagccgggagcagtggctcatgcctgtaatcctagcactttgggaggctgaggcgggcagatcatctgaggtcaggagttcaagaccagcctgggcaacatggtaaaaccctgtctctactaaaaacacaaaaattagccaggcatgatggcaggcgcctgtaatcccagctacttgggaggctgaggcaggagaatcgcttgaacccaggaggcagaggttgcagcaagctaagattgagccactgcactccagcctgggcaacagagcaaaaactccgtctcaaaaaaaaaaaaaaaaaaagagagagagagagatcggttttgctatgttgcccaagctggacacggacacacacacacacacacacacacacacacacacacacacacacacacacacaagctggacacagagacacacacagtgacagggcaaaggttccaaaattttaaacctggtaaatctgggtacgggtatacaggagttgttctactacactattctttcaacttttttgaaagtttgaagttatttcaaaagaaaaagttttccaaactttagtgatcctcctgcctcagcctcccaaagtgctgggatgataggcatgagccaccgtgcctgacccctctgtatatttttagaatttcatgttaaaagatggaaaagtctggatgaggtagttcacgcctgtcttcccagctctttgggaggccaaggtgggaagactgcttgaagccagacgttcaagaccaacttggccaacatagtgagaccccgcttttttctaactaaaaaaatttttttccaagttggaaaaaatatctagccataagacaaaccttgaaactgcaaaagaacaatggagtatgtgtgacaggaggtactgctctacagtggggttaaagccatacacaagctgtggtggctcacgcctgtaatcccagcactttgggaggccgatgcgggcggatcatgaggttaggagttcaagaccagcctggccagcatggtgaaacccgtctctactaaaaatacaaaacattagccagacgtggtggtgggcacctgtagtcccagctactagggaggctgaggcaggagaatggcgtgaacccaggaggcggagcttgcagtgagctgagattgcgccactgcactccagcctgggcgacagagcgagactctgtctcaaaaaaaaaaaagccatacacaagctgttaccactaaatgggaaaatgactgaaaaatgtcaatgtcaagagggactgaaatcaaatttttccaatagtgggttacatgatcagaaatccaaatagacaggaaatatgttggctttatttatttatttatttatttatttatttatttagacagagtctcactctgtcacccaggctggagtacagtggcatgaactcggctcactgcaaccttcacctcccaggttcaagcgattgtcctgcctcagcctcccgagtagctgggactacagatgtgtgccaccacacccagctaatttttgtatttttagtagggacggggttttaccatgttggtcaggctggtcttgaactcctgacctcaagtgatccacccgccttggcctctcaaagtgctgggattacaggtgtgagccaccacacctggccggtactggctttaaaaataacaaaagtaatacatacacatagaaaaaggtcaaacaaagaagtacatagaatgaaaaatgaatgctgtgtcccctcccagaccatttctgtgaataaatatgtaataccatgaaatgatgaggactaacattttctgaatgccaggcaccactctatgtgctttccacacattcattaacctcatttaattttctcatttaattaatgagataaattaatgtatctcatttaattttcacaacaacctcatgcagtaggtgtaactgtcaccctcatttcagagagcagaatactgagagctggaggccaaggggcaatttcagccagggtggctggtgacgcctcggtgaaaccaagagcgaacagtgagagcagcggccacctgctggtctgcagggatggtgtcctgggcagaaagaatagcaagtgccagggctgtgctggggccgggctttgcatgtgtgagaacaagacagagaatgagggaggtgggcccacgaggagtgtgggcacagacagcagcctctgcctgtggtgccacgctgaagactcagtattgtatgtgacagatgaaggctctaagaagacagctctgacaaaagctagagtgcaaaatcagactcagacacaaccaccggtctgtgtcctgaacacaatggacctttacactctggaatttctcaaacggagcaatgcacagacacccccatgggccccttgcacacccgcagattctcctaggagtcacattctctcttcagatagactctgggtgccgacactcccaaacatgctcttgaggagcagtctctgtgataagctgatcttccagacaatccagaatattcttaaaactttttagatcataaaatttaaaacacaaattaaaaaacaaattatcataaggccgggcacagtgactcatgcctgtaatcccagcactttgcaaggctgaagcaggaggatcacttgagcccaagagttcaagaccagcctaggcaacatagtgagaccctgtctctacaaaaaagtcaaaagttagctagacatggtggtgtgcacctgtattcccagctacttgcagggctgaggtgaggaggattgcttcagctcgggaggttgaggctgcagtgagccaagatcacgccactgcactccagcctgggtaacagagtgagaccctgtctcaaaaaacacatagggccaggcgtggtggctcacgcatgtaatcccagcactttgggaggccgagacgggaggatcacttcactccaggagttcaacaccagcctggccaacatagtgaaaccccgtctctactaaaaatacaaaaaattagttggacatggtggtgtgcgcctgtaatctcagccactcaggaggctgaggcaggagaacgcttgaacttgggagacagaggttgcagtgagctgagatcgcaccactgcactccagcatgggcagcagcgcgaaactctgtctcaaaacaaacaaacaaacaaacaaacacccataaacacaaaatgtatcacagcctcagagatccccacgaatgcctaagtggccctgaatttgggaggcactgctcagtaatagtcctatctgtcccacaacagacaggagtgctgggctgcacctactggcaacaaacacagcaacccttgactgaagaaaggtccatgccacaatccccttattctgtaagccactaattttgtcctctctcctccacctttcactgaggaacgagctcttggaaggacagggacacccgcctagtagctgagccagccacatcagtcctggagagcaggtggagggcagatgctgtgatcatcccagaagagaggacacagttggaggcagatgcatggtctctactttcagctaccctcaatgcagcctggtccccagaggcctgaagagcgccttgtttatgtggtgacctcaagaggggctgctcctgcaccaaggctatgtgtgcatgctaacacagtaaccgtcatatactcaaagtgtcagctctaagaactggagatgaggagctgcaagccactctacagttatcaaaggcacagctgagggggtttgtgctgaccaagctggttgcctggtgtttggattgggacttatttactttggaaaatatgcagcaacagcccagcaccaaagttcacatcaaaatcccactgatgaccttggctgctttcatctctgaagcgccacttctcagaaacacagaggtaagttgggtttctaatgtttctgctgattataaattatttttggtgtttacggataggcaactggttcatttttctagcaaactaagaattcagaagctttctacactgttttagaagtgggaaatggtttcatttttcagtgtgcctattataaaattgtgtcagttccattgttgggagagttgacaaacttagaataggagctgtggaatagatgaaaatattgtacttatattaaattaatcgaattggataactgtcctgtgattatgtatgagaatatccttgctcttgggtattttccctgaagtattagtattaaaggttagaggggccgggtgcagtggctcacgcctgtaatcccaacactttgggaggccgaggcgggtggatcacgaggtcaggagttcaagaccagcctgaccaacatggtgaagccaagtctctactaaaaatacaaaaattagctgggcgtggtggcacgcgcctgtaatcccagctactcaggaggctgaggcaggagaatcgcttaaacccgggaggcagaggttgcagtgagcggagatcgtgccactgcactccagcctggacaacagagttagactccgtcaaaaaaaaaaaaaaaaagaagaaaaaagaaaaaatgttagaggaacaagatataggagacctactctcaaatggtctagaagaaaaaatgtgtatgtgcatgcctgtgagaacacacacgtacgtacacacacacacagataatgacagggcaaaggttccaaaattttaaacctggtaaatctcggtacgggtatacaggagttgttctactacactattctttcaacatttttggaagtttgaacttacttcaaaataaaaagttttccaaactttaggcagttacttctctcccattctgcctgctctgttgggcctggagaccatacaccaggagggatgacggtttatcaagtgttatgctctgatgcgtgactgaaaaggccaacccagctctggcaattagcaagaaagcacaatatgaagttcccaggaaaaaaaaaaagcaaaacaaacttttgaatgatttatctttaaaatatattgtttctcttcaaacagtaatctggatttaatcacaacctagtgatagtttttaaacgtcttctacaatgtttgttatactaaatagcaaaacatcaggaagatttaccttcagatctttaatttcaatccataaaagatatcagagatattttctccttcctctggtaagggaatgacgaaaactatttttggctttttatcagataatgtgggaacagggtataagaagtttccaaatataacttctgaataccgggataaaacatgcatgtctttactctgccactctatctggcctcagatacgttttcctgaatgcttatttattcaagttggtttttgttttgttctttaaccttatttttatctgagaagaaaacattttccccctttgttccttcttcttttggctttcttttttaaaatagagatgaggtcttgctatgttgctccagctggtcttgaactcctgggctcaagcgatcctcctgccttggcctcccaagatgctaagattacaggtgtgagcccctatgcctggtcttcttcttcttgatcttagccaaaaggccaagaagtgataagaggaggacacttgaagtgtagttgggcaaggagccttctaccagctgcttactttctttgttcctgacttttaaaagtgtgttgctattgatacacagtctcctgatatgtaaaatgctgggaggatgaagctaagttactcaaagtgccattcagaaactgggcccagttctatttgcagctacatacattagaaatcatttctagaggctgagcatggtaactcatacctgtaattccagcactttgggaggccaaggcaggagaattgcctgagctcaggagtttgagacctgtctgggcaacatggtaaaaccccatctttaccaaaaacacaaaaaattaactgggtttggtggcacacacctgtggtcccagctacttcaaaaggctgaggtgggagggtctcttgagcctgagaggaacaggtggcagtgaaccaatattgtgccactgcactccagcctgggtgacagagtgagaccccgccgtctcaaaataaaaataaaaagaaatcgtttctagaaactgttttcccgtgtgtaaactagtggcactgcagcctgaggcaggtgctgagatggggacctggaaaaggcaacaggcattttgagtcagaaacaatgtgactttcctgctccaaaatgtgcaattcaaaagtctttcttagttgtgactaaaacaaactttgaacttactatttcaacagtattataaggggaagacccaaggaatgggactggcactgggaaaacagctaggaagctgctctgcacggccagggagtctggaagcatcctggtactccagagcgaacaaggctgagcgcttgatgtggggcttagaggcttaaccaacttggttcgaatctagccactgccacttattagtgacagtgacgaaaggctcagtctcctgatatataaaatgttgggaggatgaaactaagttacacgaagtgccttatacagcgtgtcaggcatccaacagaggccattatcaacattaaccacactgacagcatttcaagcagagtatccgaacagttaccccatcttcaggcctactgagttcaaatatttgcttaacaagagcagccagtaactcttacctggcctcaactggcagcagatattctgggcctcaaatatctatctaataggaaatggtcacagacacaaaataagcttaacaaaaggcagtttttttttgttttttttttgttttctgttttttgagataaggactcactctatcccccaggttggagtgcagtagtggcgtgatcacggctcactgcagactcaagtgatcctcctacttcagcctctcaagtagatgggaccacaggcgtgtgccatcacaccaggctaattatttttcttttcttttttttttttttgagacggagtttcgctctttttgcccaggctggagtgcaatggtgcgatcttggctcaccacaacctctgcctcctgaattcaaacgaatctcctgcctcagcctcctaagtatctgggattacaggcatgcgccaccacgccggctaatttttttgtattttttgtagagacagggtttctccatgttggccaggctggtctcgaactcccgacctcagatgatccgcccacctcggcctcccaaagtgctgggattactgacctgagccaccgcacccagcctatttatttaatttttcacagagatgaggtcttgctatgttgcccacactggtcttgagctcctgggctcaagtgatcttcctgccttggtctcccagtgttgggattataggcgtaagccacagcgcctggccggcagttctttctggggtgattagaagttgggaccatgtattacctgtctgagtcagcattataaacacctatggtcactgtcctggcaaaacatggaatcatcaaagctcatctaaccagagtgcagttaataaccaggaagtaagcaagagaaagacaaaggatttggcagtcaaaacagatttgacaggccaagtcagatcctcctctgaacgagtcagaggaacaaataaagacaggattgccataatgcctctgtgctaaaagcttatcttgtttacttaaataaagggagtgcccctcaggtcttgagtaagagcttgctgacatcaccctcacacagactttatctcttgtttctaaccctgtgttagaagcagtaacacagaagatttagttgctcctgacagcagtgggagctattgtctaagagatacaaaggagaaaaaagtatacctgcagcaagtgatatcacctctggggctgccaccacatcacctcactacgccctgagggggtctcagcactagacaagttccaaatcttttgcaaattaaacaaccccaggtcaggcgtggtggcttatgcctgtaatcccagcactttggggggctgaggtgggtggatcacctgaggtcaggagtttgagaccagcctggccaacagagcaaaaccccatctctactaaacaaaatacaaaaattaaccaggcgtagtggtgtgcacctgtagtcccagctacttgggaggctgaggcaagagaattgcttgagtccaggaggccgaagttgcagtaagccgagatcgcgccactgcactccagcctgggtgacagagtgagactccatttcaaaaaataaaaacaacaaaagccaattacaacaacaacaacaaaaaaacaacgaattaaacaaccccaaagattgcacaaatttcaagtatctttagaatatgttttcagaaagcctggcccatggacatttttcaacagcatctccattgcaaaggtggaatggtgtgagtcacacaggcatggctgagtcccactaatgcacatcccttctaggtactctccaatcaccagccccaggtgcccactcaagcccagctcttagtgaggtttccctgactctctgggcacttccactcctaccacacagggtagagccacacccctttccgtacccccatgtgctctggcagcattattttgagagccttcgctttactgcacgtctgtcccatctgtcccctgactggtccatgagcccctggtgggaactttgtctctggtaactaaacactgtctggaggtggtggacaaggtgtctggagaaaaacaaactcctccctgggatgcctgagctcccaggattctagaaggttagttttgcaaacctttaaagaagggattttcatcaaggggcccacagatccttcattgaggtttatgagtcccacatcaaaggttgggtgtctatctacatcagattctcttaaagtccatgatcctaaaacagttaagaactaatgctgtgagggcctcttcctgggtcaaagccacagggaacctgccatgtggatgctgcagcggggtgtggatcagccaggccgcctttcactgtgttctgttttccctcccagctttagctccgccaaaatgaaacactcattaaacgcacttctcattttcctcatcataacatctgcgtggggtgggagcaaaggcccgctggatcagctagagaaaggaggggaaactgctcagtctgcagatccccagtgggagcagttaaataacaaaaacctgagcatgcctcttctccctgccgacttccacaaggaaaacaccgtcaccaacgactggattccagagggggaggaggacgacgactatctggacctggagaagatattcagtgaagacgacgactacatcgacatcgtcgacagtctgtcagtttccccgacagactctgatgtgagtgctgggaacatcctccagctttttcatggcaagagccggatccagcgtcttaacatcctcaacgccaagttcgctttcaacctctaccgagtgctgaaagaccaggtcaacactttcgataacatcttcatagcacccgttggcatttctactgcgatgggtatgatttccttaggtctgaagggagagacccatgaacaagtgcactcgattttgcattttaaagactttgttaatgccagcagcaagtatgaaatcacgaccattcataatctcttccgtaagctgactcatcgcctcttcaggaggaattttgggtacacactgcggtcagtcaatgacctttatatccagaagcagtttccaatcctgcttgacttcaaaactaaagtaagagagtattactttgctgaggcccagatagctgacttctcagaccctgccttcatatcaaaaaccaacaaccacatcatgaagctcaccaagggcctcataaaagatgctctggagaatatagaccctgctacccagatgatgattctcaactgcatctacttcaaaggtaagaggcacctttacagttctcacagcaaacccacaacatactatttttgtatgtgggtagattgaatgccaagaactgtactgtagctataatttatccaggaaaactagacacaagattgactctggaacggggacagggaaggccaagctgaagtgacagtagcatctgacacttactgagccctaactctgtgctttaacacagccttgtgaggtcatcactgttattagcatccccattttacagaggaagccaccaacacatgaagtaaaaggatgggctgggcgcggtggctcacgcctgtaatcccagcactttgggaggccgaggcaggcagatcacttgaggtcaggagttcgagatcagcctgaccaacagaccaacatggtgaaaacctggctctactaaaaatacaaaaattagctgggcctggcggtgggtgcctgtactcccagctacttgggaggctgaggcaggagaatcacttgaacctggaaggcagagattgcagtgagccgagactgtgccactgcactctagcctggacgacagagtgagactccatctcaaaaaaaaaaaaaaaagaagtaaaacgatgctccaagggcacccagttattaaggggcagagccaaagctgaacccagggaggccaaccctagcaatctgttaaattggaagaaataatacaaaaactgttttagcatttggccagcctggatttgagttttctcttttcctttcccaattatcaataagcaggaatatagacaaaaggctaaagaaatgcacctgtgaactattcagcttgagcagctgacattgacacctacaagtgcttttcaggatacttttgaactactgggcaggtgggatggagaaataaattactatttccccagcaactgttctgggctgagcacaagggcactttttaaggaggtcaccccacacccatcacacacacataggacccctggaatcctaggaataaataagcatggatttgtaaaatccaaacctctcttttcaaatatcctcacctggaccagaccagaagaaacctctactttactctctaagctgagagtgtggaaggggaaacacgaggaatggttcggcttcaggactaattgcggtgacacacaaccacttctctttgccaccaaggactaccaggtacctgcaaagggcagtacttggaggccagtgctttctgctagttagctcccgtggttttatagcagcccaggcgaaggaaggagaccccccccagctcctggcttctgttcagggaaagggggccagagcccctcctgatctgtccacacacctgctctgtgccttggctgaggcccctgcagctctacaaggcaggcattctgctggataggccaagcagggtcactctgacacccaggtttccaccccaaggcatggcacaatgctggcctcctgtgggtggaatcaaaggctgagttctaacaggcttgcggcagacacacacacagagaccacatgtacatgatgaacacacatatccttttcattacaggttattagtacaagttttggaattgagcaaacaagagtctaagcgctggtttcaccacttctcgtttgtgtgacctcagacaagtcattcaacatctctatgactcagtttccttatctttatcacagagatgacacccactctgacagggccgagggaagaaccataagcgatggcaatgcaacagagtggcacatgacaagagctcagcgaatttgagggaatgaaactgtagattacaatactagtacaatatgataaacatatgatattgttagtgacatttattttacttctactagcaaataacctatgtttaggactgactttagaacaggctggcagaagcatttttggcagcatcaaagtcctccaacctactggtctgttggagccccccaagtacaccaaagagcctctgcattagccctggctgagggttcagggacaggcagagaagtacagcagtgagccatccctgcctgcatggaggtggagaaatgatcaggcatggtcagttgacaatctcctaaacacagtaacccgtgtcataccacagtgtaaacacacgtgcaaatgcttctgcttcctttccccatcatgagaatagtcactcaatgccgggcatcacaagggatcaaatgctaggagtacccaatcattcatggatgcttctcaaaggggacgagtgtctagaagtgtaattttaatttcacttaatttcatatggaatcatctccattactaattttgttctaattttaatgtgataatcactttgtaaagcacaataaacagaggcaggctctcatgaggaagtcagaaggaaagaatcccaagagacatgggacagctccatccaaactgaaagggccgtgattcccaaaagagcaattttgtccccaaggtctgaagacacttttggttgtcacaacctggggggttggagtaagcattactggtatctagaagggggaggctggggatgttgctaaacaccctaccatgcacagggcagcccacattgccacaaactattatgtggcccaaatgtcaaaaatgctgaggttgagaaaccctgggtgaggcagactcagggagaagggaatcgagcttcactcacaggcaggcaggagctgtctggtacttcaacctccaagacacctcctgctcatctcatcctggctgctctacccaccagctagaaaccttgaacaagttacttcacttctttgtgcctctgtttcctcatatgtaaaagagggataacaaaacgcacacaacttgcatgttgctaggagcagaaatgagataatacaggaaaggtgctgagaagaatgcccggcacatggccagttctcaactactagtcacccattactattagttactcacatcttagagctaacatagacatgggcttattcctggatacacagcactgtccccatatctacagtggtgatcctaagggcaacatggcatcacccaaatgtcttgttagtcactacagaatcacagtgtgagggatgaaggccatcaagacagagctgaggctggcagggtggctcatgcctataatcccagtgctttggaaggctgaggcaggaggattgcttgaggccaagggtttgagaccagcctaggtaacatagcaagaccccatctacaattaaaaaaaaaaaaaaaaagacagaaagaaaaaatagccaggcgtggcatgtgcttgtagtccaagctactggggagggaggctgaggcaggaggattccttgagcctgggagtgtgaggctgcagtgagctatgatggcatcgccgcactccagcctgcatgacacagtgagacctggtctcaaaaaccaaataataataacagtaataaaagctggaaagagctcaaagttactcatttgacagatgtgacagatgaagaaatagaagcgagttaggtgccttaccatggtcaaacaactagttcgtatcagaccctactccagaaactattccagtccgggtaacctctcgttaacctctcttgttagaaatgcaaatttctgcccaaatcaggcctcaggaatcaagagactgtggggtcggctctgcaggctatctgaatgaggcctccagggaaatcagattcactctcaagggtgagacgatttccctaaaggaaccttctcataacagcctcttcctgtggcctttacaggatcctgggtgaataaattcccagtggaaatgacacacaaccacaacttccggctgaatgagagagaggtagttaaggtttccatgatgcagaccaaggggaacttcctcgcagcaaatgaccaggagctggactgcgacatcctccagctggaatacgtggggggcatcagcatgctaattgtggtcccacacaagatgtctgggatgaagaccctcgaagcgcaactgacaccccgggtggtggagagatggcaaaaaagcatgacaaacaggtatttcacactgtgtgtttgttcttttgagctcccagatgctgggggtgtctgggaatactggaaaatggatcatttttttaaaaagggagaattatgtacaagtacccaagaacttccatacagggccactctgttaattcagccccaatttgttgcttgagataagagatgattagagagcattcataagggacacatctgccctctaggggccagtttcagaagttagaggcagatgacttagagacagcttggtgcttgctttgtggcttcgagtcccagcttcatcatccctaaaatgggtataattccattacttccccgggtcacttgagaaaataacagaatcagcgatgctgagcgcccctcccagtacttggaacctaggaggcactcaaaaaaagattggctcaactcttccctgcccaggaaattccaaggtcctcttagcctaccgaggacacatcattcatgatttcctctattattattcgttactttgtagttaaaactgcaggtgttaagtacttattgagattattattgggtcatggcagaaagaatggagaggtcttatttctgtcttactggatactggctaggcccatatgaagaagtgattctggtttgaacctccttataggacaagaatacaaacatatgcaaccaaactgagaaaagtaggctctcagaggaaggtatttgcccgggtagccagtcatcatgctctgtgaatttttccttaacaacgtcccttctgtacctgcctccttccattcctccctgcagcccggcagctcttgagaaagggactgcatcttttttttttttttttttttgagacagggtcttgttctgtcacccaggctggagtgcagtggcatcatcatggctcactgcagcctcaacctcctgaacttaagtgatcctctcacctcagcctcctgaatagttgagactacaggcgtgcaccttcatgcccagctaattaaactttttttggtagagatgaggtctcgctgtgttgcccaggctggtcttgaactcctggcctcaagcagtcctcctgccttggccttccaaagtgctgggattaacaggcgtgagccgctgtgcctggcccatttgacttttaattgagatcttacttggtgcaaggtatgagctaggtaaaagagtgaagaagatcaagccttcctgcccatccagctgggattgcaccttaaatctctttatcccctgcaaagtgccagactaactccacaggcactactgttgctatccgcccccttagggattgagtaagttgaggcaaagattgagaatattcagcattgtctagtatatacaggaaaggttctttttaaaagtacactaccagatattcgactccttaattacaaaaaaaaaaccaaatgcctaaaattgggaaaccaaaccagagaattattttagatgcctttttaaaccataaaccaggaaaagttctgctgctaaccttgaagataggaaacgaaccatacagtctcaaggaaataatcatgcaacagaaaacacacctcagttttcagtagcggaattacaaaggagtgtgcttcctaaaatcctcaactgacagtcccggaatataaattttaataagtgctatatcaattctgtgataaatataacccgtggccctttaaagggaaaatcatgattcttttgtaacttgtggttcaataaaactgggcccccctttccttttctgtctagaactcgagaagtgcttctgccgaaattcaagctggagaagaactacaatctagtggagtccctgaagttgatggggatcaggatgctgtttgacaaaaatggcaacatggcaggcatctcagaccaaaggatcgccatcgacctggtaaccactcccttgtccacccccgacccgtccccagggtctgcctcagcacagccccacctccacttgcccttcctacccaccccccaatctcatgtcccagcttggggtgctgagtctgctcttcggcctgggtgggatacacagaatgcctagtttcatggatgccagctggagagcacggcacctggcagacacttactgggcaggggggatcccaagagcagccatggggtgagccccactcccgctgacaccagagacaggggagacatgtgctgcggtctgggaaatagctacccccagccaaatcatgaaagagccattaaacaccgcactatacacatacttaacttaaaccaatcgggcgctcagcaaaagagagagaacaccagtccaaacagtgcagcagacccagttccccatcccggagaagtgcgcagcagtgtggggagctggagctggggtggctgtcctgcaccagcccccacgaccctcagaccacaggcactgccaagagggaacatgaacctagccggcctctaagtgcaacggctgcccctgacaggtggtgacagatattttcaagagtgactctgaccagctgtgatttccaccttacatgttgtctttggatcctttccctgaatgatatgagattgtgctgggaactctagccctctgtgtgctgacctccagaatctgacaactttcctttccaaacagttcaagcaccaaggcacgatcacagtgaacgaggaaggcacccaagccaccactgtgaccacggtggggttcatgccgctgtccacccaagtccgcttcactgtcgaccgcccctttcttttcctcatctacgagcatcgcaccagctgcctgctcttcatgggaagagtggccaaccccagcaggtcctagaggtggaggtctaggtgtctgaagtgccttgggggcaccctcattttgtttccattccaacaacgagaacagagatgttctggcatcatttacgtagtttacgctaccaatctgaattcgaggcccatatgagaggagcttagaaacgaccaagaagagaggcttgttggaatcaattctgcacaatagcccatgctgtaagctcatagaagtcactgtaactgtagtgtgtctgctgttacctagagggtctcacctccccactcttcacagcaaacctgagcagcgcgtcctaagcacctcccgctccggtgaccccatccttgcacacctgactctgtcactcaagcctttctccaccaggcccctcatctgaataccaagcacagaaatgagtggtgtgactaattccttacctctcccaaggagggtacacaactagcaccattcttgatgtccagggaagaagccacctcaagacatatgaggggtgccctgggctaatgttagggcttaattttctcaaagcctgacctttcaaatccatgatgaatgccatcagtccctcctgctgttgcctccctgtgacctggaggacagtgtgtgccatgtctcccatactagagataaataaatgtagccacatttactgtgtatctgttataattctctattttttgaagctcaaatatcaaaagccaaatccaaattcctggataactccaggtatgataaaggctgagaggaagtcacttgagcaccacaatgtgccacagcagggcatgttctcaggacaggacaggtgtgtgctgaatcctggggagggtctgtgcagtaccccagaactgtggggtgctaagtggcacacaagccccagggctcccacagtctatgccaggctgctgcagctttcatccctcatacctggtcctgcagtgggtctggtttgacagagcagatgacacctgaggaatatgtttctggatccttcaatccctgggtaagacaagtgaaatccacagaggctgttcagcacgcaagagtgccagtgctctttcagtgaggggatgactgacggtcacaggtgctgtgtgtgcaggtgtctaactgtaacccccacagcctggcagatgaggaagacaagggttggaagagttctgaaacctgtccaagatgctgaagtagtggggctgggttcaagtgcaggttggctggactccagggaccacacaaggagtcctgtcacaggcttctgaccccatgagaccaataccagtaagaagagtggtaaaagggagtagggacggaaggggaacgtcactgccctttgtaggcatgcctgtgggttatctcacagagtctccttaccctcaatccctagggggctggcactgttacccctcctttttacagctgcagaagcaatttcagctcacagaagggaaggcctctgcctgaggcctgaatccacacccaggcagggggaccctgcagccctgctttcccctgctcccttcctgacttcccacactgggctctgcctccttactctgctgagagcagatggtgcaggggctggatgaattgccccaagccatcctctcggcttcctggtgaaccctgatgctgcggatggcccactccttcaattcattctccaatctgcttcacccctcttcttttctgtcattctccaaactgcttcaccactcttcttttctgtcattctccaacctgcttcaccactcttcttttctggtgcctgtcctatatttctcatcttgctgcagcttccttttggctcttctcatttctaaatgtaataatctcaaaaaacccttttagtcctttgccatgtctgtcccatacccagaaaggcagtggtcacttctgctcacccagcgccctctctgctacagccggtgtggagtcctccacactcttgagcatccagacacccccgtttcaatgccttttgttcatgtacacccactcagaatctctcagatcccctcttacagaaactagcccatctgttactcaaagcaggagagtactcattcagaacacaggctctgagccaggctgcctggtttgaatcctggctctgccatctagtagctatgaaactctagtagcaggttctgtgcctcagtatcctcatctgtaaaatggggagaccagcagcacttaccttgagggattgctgtgaggattaatcaaattaatgtctagaaagcatttatttatttatttatttattcatttattttatttttttgagacggagtctcgctctgttgcccaggctggagtgcaatggcacaatcctggctcactgcaacctccgcctcctgggttcaagcaattctcctgcctaagcctcccgagtagctgggactacaggcacgtgccaccacgcttggctaatttttgtatttttagcagagatgaggtttcaccatgttggacaggctggtctcgaactcctgacctcaggtgatctgcccaccttggcctcccaaagtgttgggattacaggtgtaagccaccatgcctggtctggaaagcatttagatcactgcttggttttagcaagaactaggaaaggttgtcacattattctcaatctaagagagtacataagccaggcc

SEQ ID NO: 2 - RNA, 23 nt, Homo sapiens
  misc_feature 1..23: note = Origin of RNA sequence:Starting position on NM_000185.4946
  source 1..23: mol_type = mRNA
ggtgaataaattcccagtggaaa

SEQ ID NO: 3 - RNA, 23 nt, Homo sapiens
  misc_feature 1..23: note = Origin of RNA sequence:Starting position on NM_000185.4920
  source 1..23: mol_type = mRNA
aactgcatctacttcaaaggatc

SEQ ID NO: 4 - RNA, 23 nt, Homo sapiens
  misc_feature 1..23: note = Origin of RNA sequence:Starting position on NM_000185.4919
  source 1..23: mol_type = mRNA
caactgcatctacttcaaaggat

SEQ ID NO: 5 - RNA, 23 nt, Homo sapiens
  misc_feature 1..23: note = Origin of RNA sequence:Starting position on NM_000185.4557
  source 1..23: mol_type = mRNA
aagggagagacccatgaacaagt

SEQ ID NO: 6 - RNA, 23 nt, Homo sapiens
  misc_feature 1..23: note = Origin of RNA sequence:Starting position on NM_000185.4944
  source 1..23: mol_type = mRNA
tgggtgaataaattcccagtgga

SEQ ID NO: 7 - RNA, 23 nt, Homo sapiens
  misc_feature 1..23: note = Origin of RNA sequence:Starting position on NM_000185.4676
  source 1..23: mol_type = mRNA
cttcaggaggaattttgggtaca

SEQ ID NO: 8 - RNA, 23 nt, Homo sapiens
  misc_feature 1..23: note = Origin of RNA sequence:Starting position on NM_000185.41501
  source 1..23: mol_type = mRNA
cagctgcctgctcttcatgggaa

SEQ ID NO: 9 - RNA, 23 nt, Homo sapiens
  misc_feature 1..23: note = Origin of RNA sequence:Starting position on NM_000185.4854
  source 1..23: mol_type = mRNA
ctcaccaagggcctcataaaaga

SEQ ID NO: 10 - RNA, 23 nt, Homo sapiens
  misc_feature 1..23: note = Origin of RNA sequence:Starting position on NM_000185.4716
  source 1..23: mol_type = mRNA
gacctttatatccagaagcagtt

SEQ ID NO: 11 - RNA, 23 nt, Homo sapiens
  misc_feature 1..23: note = Origin of RNA sequence:Starting position on NM_000185.4917
  source 1..23: mol_type = mRNA
ctcaactgcatctacttcaaagg

SEQ ID NO: 12 - RNA, 23 nt, Homo sapiens
  misc_feature 1..23: note = Origin of RNA sequence:Starting position on NM_000185.4407
  source 1..23: mol_type = mRNA
aagagccggatccagcgtcttaa

SEQ ID NO: 13 - RNA, 23 nt, Homo sapiens
  misc_feature 1..23: note = Origin of RNA sequence:Starting position on NM_000185.4414
  source 1..23: mol_type = mRNA
ggatccagcgtcttaacatcctc

SEQ ID NO: 14 - RNA, 23 nt, Homo sapiens
  misc_feature 1..23: note = Origin of RNA sequence:Starting position on NM_000185.41191
  source 1..23: mol_type = mRNA
ggcaaaaaagcatgacaaacaga

SEQ ID NO: 15 - RNA, 23 nt, Homo sapiens
  misc_feature 1..23: note = Origin of RNA sequence:Starting position on NM_000185.4677
  source 1..23: mol_type = mRNA
ttcaggaggaattttgggtacac

SEQ ID NO: 16 - RNA, 23 nt, Homo sapiens
  misc_feature 1..23: note = Origin of RNA sequence:Starting position on NM_000185.4974
  source 1..23: mol_type = mRNA
cacaaccacaacttccggctgaa

SEQ ID NO: 17 - RNA, 23 nt, Homo sapiens
  misc_feature 1..23: note = Origin of RNA sequence:Starting position on NM_000185.41189
  source 1..23: mol_type = mRNA
atggcaaaaaagcatgacaaaca

SEQ ID NO: 18 - RNA, 23 nt, Homo sapiens
  misc_feature 1..23: note = Origin of RNA sequence:Starting position on NM_000185.4947
  source 1..23: mol_type = mRNA
gtgaataaattcccagtggaaat

SEQ ID NO: 19 - RNA, 23 nt, Homo sapiens
  misc_feature 1..23: note = Origin of RNA sequence:Starting position on NM_000185.41100
  source 1..23: mol_type = mRNA
gggggcatcagcatgctaattgt

SEQ ID NO: 20 - RNA, 23 nt, Homo sapiens
  misc_feature 1..23: note = Origin of RNA sequence:Starting position on NM_000185.41193
  source 1..23: mol_type = mRNA
caaaaaagcatgacaaacagaac

SEQ ID NO: 21 - RNA, 23 nt, Homo sapiens
  misc_feature 1..23: note = Origin of RNA sequence:Starting position on NM_000185.4771
  source 1..23: mol_type = mRNA
gagagtattactttgctgaggcc

SEQ ID NO: 22 - RNA, 23 nt, Homo sapiens
  misc_feature 1..23: note = Origin of RNA sequence:Starting position on NM_000185.4543
  source 1..23: mol_type = mRNA
tttccttaggtctgaagggagag

SEQ ID NO: 23 - RNA, 23 nt, Homo sapiens
  misc_feature 1..23: note = Origin of RNA sequence:Starting position on NM_000185.41346
  source 1..23: mol_type = mRNA
gccatcgacctgttcaagcacca

SEQ ID NO: 24 - RNA, 23 nt, Homo sapiens
  misc_feature 1..23: note = Origin of RNA sequence:Starting position on NM_000185.4853
  source 1..23: mol_type = mRNA
gctcaccaagggcctcataaaag

SEQ ID NO: 25 - RNA, 23 nt, Homo sapiens
  misc_feature 1..23: note = Origin of RNA sequence:Starting position on NM_000185.4948
  source 1..23: mol_type = mRNA
tgaataaattcccagtggaaatg

SEQ ID NO: 26 - RNA, 23 nt, Homo sapiens
  misc_feature 1..23: note = Origin of RNA sequence:Starting position on NM_000185.41190
  source 1..23: mol_type = mRNA
tggcaaaaaagcatgacaaacag

SEQ ID NO: 27 - RNA, 23 nt, Homo sapiens
  misc_feature 1..23: note = Origin of RNA sequence:Starting position on NM_000185.4984
  source 1..23: mol_type = mRNA
acttccggctgaatgagagagag

SEQ ID NO: 28 - RNA, 23 nt, Homo sapiens
  misc_feature 1..23: note = Origin of RNA sequence:Starting position on NM_000185.41198
  source 1..23: mol_type = mRNA
aagcatgacaaacagaactcgag

SEQ ID NO: 29 - RNA, 23 nt, Homo sapiens
  misc_feature 1..23: note = Origin of RNA sequence:Starting position on NM_000185.41506
  source 1..23: mol_type = mRNA
gcctgctcttcatgggaagagtg

SEQ ID NO: 30 - RNA, 23 nt, Homo sapiens
  misc_feature 1..23: note = Origin of RNA sequence:Starting position on NM_000185.4770
  source 1..23: mol_type = mRNA
agagagtattactttgctgaggc

SEQ ID NO: 31 - RNA, 23 nt, Homo sapiens
  misc_feature 1..23: note = Origin of RNA sequence:Starting position on NM_000185.4674
  source 1..23: mol_type = mRNA
ctcttcaggaggaattttgggta

SEQ ID NO: 32 - RNA, 23 nt, Homo sapiens
  misc_feature 1..23: note = Origin of RNA sequence:Starting position on NM_000185.41196
  source 1..23: mol_type = mRNA
aaaagcatgacaaacagaactcg

SEQ ID NO: 33 - RNA, 23 nt, Homo sapiens
  misc_feature 1..23: note = Origin of RNA sequence:Starting position on NM_000185.4945
  source 1..23: mol_type = mRNA
gggtgaataaattcccagtggaa

SEQ ID NO: 34 - RNA, 23 nt, Homo sapiens
  misc_feature 1..23: note = Origin of RNA sequence:Starting position on NM_000185.4412
  source 1..23: mol_type = mRNA
ccggatccagcgtcttaacatcc

SEQ ID NO: 35 - RNA, 23 nt, Homo sapiens
  misc_feature 1..23: note = Origin of RNA sequence:Starting position on NM_000185.41202
  source 1..23: mol_type = mRNA
atgacaaacagaactcgagaagt

SEQ ID NO: 36 - RNA, 23 nt, Homo sapiens
  misc_feature 1..23: note = Origin of RNA sequence:Starting position on NM_000185.41326
  source 1..23: mol_type = mRNA
gcatctcagaccaaaggatcgcc

SEQ ID NO: 37 - RNA, 23 nt, Homo sapiens
  misc_feature 1..23: note = Origin of RNA sequence:Starting position on NM_000185.4980
  source 1..23: mol_type = mRNA
cacaacttccggctgaatgagag

SEQ ID NO: 38 - RNA, 23 nt, Homo sapiens
  misc_feature 1..23: note = Origin of RNA sequence:Starting position on NM_000185.4675
  source 1..23: mol_type = mRNA
tcttcaggaggaattttgggtac

SEQ ID NO: 39 - RNA, 23 nt, Homo sapiens
  misc_feature 1..23: note = Origin of RNA sequence:Starting position on NM_000185.4769
  source 1..23: mol_type = mRNA
aagagagtattactttgctgagg

SEQ ID NO: 40 - RNA, 23 nt, Homo sapiens
  misc_feature 1..23: note = Origin of RNA sequence:Starting position on NM_000185.4977
  source 1..23: mol_type = mRNA
aaccacaacttccggctgaatga

SEQ ID NO: 41 - RNA, 23 nt, Homo sapiens
  misc_feature 1..23: note = Origin of RNA sequence:Starting position on NM_000185.4411
  source 1..23: mol_type = mRNA
gccggatccagcgtcttaacatc

SEQ ID NO: 42 - RNA, 23 nt, Homo sapiens
  misc_feature 1..23: note = Origin of RNA sequence:Starting position on NM_000185.4914
  source 1..23: mol_type = mRNA
attctcaactgcatctacttcaa

SEQ ID NO: 43 - RNA, 23 nt, Homo sapiens
  misc_feature 1..23: note = Origin of RNA sequence:Starting position on NM_000185.41324
  source 1..23: mol_type = mRNA
aggcatctcagaccaaaggatcg

SEQ ID NO: 44 - RNA, 23 nt, Homo sapiens
  misc_feature 1..23: note = Origin of RNA sequence:Starting position on NM_000185.41195
  source 1..23: mol_type = mRNA
aaaaagcatgacaaacagaactc

SEQ ID NO: 45 - RNA, 23 nt, Homo sapiens
  misc_feature 1..23: note = Origin of RNA sequence:Starting position on NM_000185.4878
  source 1..23: mol_type = mRNA
gctctggagaatatagaccctgc

SEQ ID NO: 46 - RNA, 23 nt, Homo sapiens
  misc_feature 1..23: note = Origin of RNA sequence:Starting position on NM_000185.4768
  source 1..23: mol_type = mRNA
taagagagtattactttgctgag

SEQ ID NO: 47 - RNA, 23 nt, Homo sapiens
  misc_feature 1..23: note = Origin of RNA sequence:Starting position on NM_000185.4986
  source 1..23: mol_type = mRNA
ttccggctgaatgagagagaggt

SEQ ID NO: 48 - RNA, 23 nt, Homo sapiens
  misc_feature 1..23: note = Origin of RNA sequence:Starting position on NM_000185.4940
  source 1..23: mol_type = mRNA
atcctgggtgaataaattcccag

SEQ ID NO: 49 - RNA, 23 nt, Homo sapiens
  misc_feature 1..23: note = Origin of RNA sequence:Starting position on NM_000185.4545
  source 1..23: mol_type = mRNA
tccttaggtctgaagggagagac

SEQ ID NO: 50 - RNA, 23 nt, Homo sapiens
  misc_feature 1..23: note = Origin of RNA sequence:Starting position on NM_000185.4983
  source 1..23: mol_type = mRNA
aacttccggctgaatgagagaga

SEQ ID NO: 51 - RNA, 23 nt, Homo sapiens
  misc_feature 1..23: note = Origin of RNA sequence:Starting position on NM_000185.4950
  source 1..23: mol_type = mRNA
aataaattcccagtggaaatgac

SEQ ID NO: 52 - RNA, 23 nt, Homo sapiens
  misc_feature 1..23: note = Origin of RNA sequence:Starting position on NM_000185.4975
  source 1..23: mol_type = mRNA
acaaccacaacttccggctgaat

SEQ ID NO: 53 - RNA, 23 nt, Homo sapiens
  misc_feature 1..23: note = Origin of RNA sequence:Starting position on NM_000185.4881
  source 1..23: mol_type = mRNA
ctggagaatatagaccctgctac

SEQ ID NO: 54 - RNA, 23 nt, Homo sapiens
  misc_feature 1..23: note = Origin of RNA sequence:Starting position on NM_000185.41345
  source 1..23: mol_type = mRNA
cgccatcgacctgttcaagcacc

SEQ ID NO: 55 - RNA, 23 nt, Homo sapiens
  misc_feature 1..23: note = Origin of RNA sequence:Starting position on NM_000185.4913
  source 1..23: mol_type = mRNA
gattctcaactgcatctacttca

SEQ ID NO: 56 - RNA, 23 nt, Homo sapiens
  misc_feature 1..23: note = Origin of RNA sequence:Starting position on NM_000185.4415
  source 1..23: mol_type = mRNA
gatccagcgtcttaacatcctca

SEQ ID NO: 57 - RNA, 23 nt, Homo sapiens
  misc_feature 1..23: note = Origin of RNA sequence:Starting position on NM_000185.41322
  source 1..23: mol_type = mRNA
gcaggcatctcagaccaaaggat

SEQ ID NO: 58 - RNA, 23 nt, Homo sapiens
  misc_feature 1..23: note = Origin of RNA sequence:Starting position on NM_000185.41430
  source 1..23: mol_type = mRNA
atgccgctgtccacccaagtccg

SEQ ID NO: 59 - RNA, 23 nt, Homo sapiens
  misc_feature 1..23: note = Origin of RNA sequence:Starting position on NM_000185.41200
  source 1..23: mol_type = mRNA
gcatgacaaacagaactcgagaa

SEQ ID NO: 60 - RNA, 23 nt, Homo sapiens
  misc_feature 1..23: note = Origin of RNA sequence:Starting position on NM_000185.41421
  source 1..23: mol_type = mRNA
gtggggttcatgccgctgtccac

SEQ ID NO: 61 - RNA, 23 nt, Homo sapiens
  misc_feature 1..23: note = Origin of RNA sequence:Starting position on NM_000185.4413
  source 1..23: mol_type = mRNA
cggatccagcgtcttaacatcct

SEQ ID NO: 62 - RNA, 23 nt, Homo sapiens
  misc_feature 1..23: note = Origin of RNA sequence:Starting position on NM_000185.41441
  source 1..23: mol_type = mRNA
cacccaagtccgcttcactgtcg

SEQ ID NO: 63 - RNA, 23 nt, Homo sapiens
  misc_feature 1..23: note = Origin of RNA sequence:Starting position on NM_000185.4982
  source 1..23: mol_type = mRNA
caacttccggctgaatgagagag

SEQ ID NO: 64 - RNA, 23 nt, Homo sapiens
  misc_feature 1..23: note = Origin of RNA sequence:Starting position on NM_000185.4774
  source 1..23: mol_type = mRNA
agtattactttgctgaggcccag

SEQ ID NO: 65 - RNA, 23 nt, Homo sapiens
  misc_feature 1..23: note = Origin of RNA sequence:Starting position on NM_000185.4879
  source 1..23: mol_type = mRNA
ctctggagaatatagaccctgct

SEQ ID NO: 66 - RNA, 23 nt, Homo sapiens
  misc_feature 1..23: note = Origin of RNA sequence:Starting position on NM_000185.4910
  source 1..23: mol_type = mRNA
gatgattctcaactgcatctact

SEQ ID NO: 67 - RNA, 23 nt, Homo sapiens
  misc_feature 1..23: note = Origin of RNA sequence:Starting position on NM_000185.41429
  source 1..23: mol_type = mRNA
catgccgctgtccacccaagtcc

SEQ ID NO: 68 - RNA, 23 nt, Homo sapiens
  misc_feature 1..23: note = Origin of RNA sequence:Starting position on NM_000185.4915
  source 1..23: mol_type = mRNA
ttctcaactgcatctacttcaaa

SEQ ID NO: 69 - RNA, 23 nt, Homo sapiens
  misc_feature 1..23: note = Origin of RNA sequence:Starting position on NM_000185.4976
  source 1..23: mol_type = mRNA
caaccacaacttccggctgaatg

SEQ ID NO: 70 - RNA, 23 nt, Homo sapiens
  misc_feature 1..23: note = Origin of RNA sequence:Starting position on NM_000185.41417
  source 1..23: mol_type = mRNA
cacggtggggttcatgccgctgt

SEQ ID NO: 71 - RNA, 23 nt, Homo sapiens
  misc_feature 1..23: note = Origin of RNA sequence:Starting position on NM_000185.4985
  source 1..23: mol_type = mRNA
cttccggctgaatgagagagagg

SEQ ID NO: 72 - RNA, 23 nt, Homo sapiens
  misc_feature 1..23: note = Origin of RNA sequence:Starting position on NM_000185.4673
  source 1..23: mol_type = mRNA
cctcttcaggaggaattttgggt

SEQ ID NO: 73 - RNA, 23 nt, Homo sapiens
  misc_feature 1..23: note = Origin of RNA sequence:Starting position on NM_000185.4773
  source 1..23: mol_type = mRNA
gagtattactttgctgaggccca

SEQ ID NO: 74 - RNA, 23 nt, Homo sapiens
  misc_feature 1..23: note = Origin of RNA sequence:Starting position on NM_000185.4911
  source 1..23: mol_type = mRNA
atgattctcaactgcatctactt

SEQ ID NO: 75 - RNA, 23 nt, Homo sapiens
  misc_feature 1..23: note = Origin of RNA sequence:Starting position on NM_000185.41325
  source 1..23: mol_type = mRNA
ggcatctcagaccaaaggatcgc

SEQ ID NO: 76 - RNA, 23 nt, Homo sapiens
  misc_feature 1..23: note = Origin of RNA sequence:Starting position on NM_000185.41323
  source 1..23: mol_type = mRNA
caggcatctcagaccaaaggatc

SEQ ID NO: 77 - RNA, 23 nt, Homo sapiens
  misc_feature 1..23: note = Origin of RNA sequence:Starting position on NM_000185.4916
  source 1..23: mol_type = mRNA
tctcaactgcatctacttcaaag

SEQ ID NO: 78 - RNA, 23 nt, Homo sapiens
  misc_feature 1..23: note = Origin of RNA sequence:Starting position on NM_000185.41443
  source 1..23: mol_type = mRNA
cccaagtccgcttcactgtcgac

SEQ ID NO: 79 - RNA, 23 nt, Homo sapiens
  misc_feature 1..23: note = Origin of RNA sequence:Starting position on NM_000185.41099
  source 1..23: mol_type = mRNA
ggggggcatcagcatgctaattg

SEQ ID NO: 80 - RNA, 23 nt, Homo sapiens
  misc_feature 1..23: note = Origin of RNA sequence:Starting position on NM_000185.4772
  source 1..23: mol_type = mRNA
agagtattactttgctgaggccc

SEQ ID NO: 81 - RNA, 23 nt, Homo sapiens
  misc_feature 1..23: note = Origin of RNA sequence:Starting position on NM_000185.41418
  source 1..23: mol_type = mRNA
acggtggggttcatgccgctgtc

SEQ ID NO: 82 - RNA, 23 nt, Homo sapiens
  misc_feature 1..23: note = Origin of RNA sequence:Starting position on NM_000185.41497
  source 1..23: mol_type = mRNA
gcaccagctgcctgctcttcatg

SEQ ID NO: 83 - RNA, 23 nt, Homo sapiens
  misc_feature 1..23: note = Origin of RNA sequence:Starting position on NM_000185.4942
  source 1..23: mol_type = mRNA
cctgggtgaataaattcccagtg

SEQ ID NO: 84 - RNA, 23 nt, Homo sapiens
  misc_feature 1..23: note = Origin of RNA sequence:Starting position on NM_000185.41192
  source 1..23: mol_type = mRNA
gcaaaaaagcatgacaaacagaa

SEQ ID NO: 85 - RNA, 23 nt, Homo sapiens
  misc_feature 1..23: note = Origin of RNA sequence:Starting position on NM_000185.41442
  source 1..23: mol_type = mRNA
acccaagtccgcttcactgtcga

SEQ ID NO: 86 - RNA, 23 nt, Homo sapiens
  misc_feature 1..23: note = Origin of RNA sequence:Starting position on NM_000185.4405
  source 1..23: mol_type = mRNA
gcaagagccggatccagcgtctt

SEQ ID NO: 87 - RNA, 23 nt, Homo sapiens
  misc_feature 1..23: note = Origin of RNA sequence:Starting position on NM_000185.41194
  source 1..23: mol_type = mRNA
aaaaaagcatgacaaacagaact

SEQ ID NO: 88 - RNA, 23 nt, Homo sapiens
  misc_feature 1..23: note = Origin of RNA sequence:Starting position on NM_000185.41426
  source 1..23: mol_type = mRNA
gttcatgccgctgtccacccaag

SEQ ID NO: 89 - RNA, 23 nt, Homo sapiens
  misc_feature 1..23: note = Origin of RNA sequence:Starting position on NM_000185.41197
  source 1..23: mol_type = mRNA
aaagcatgacaaacagaactcga

SEQ ID NO: 90 - RNA, 23 nt, Homo sapiens
  misc_feature 1..23: note = Origin of RNA sequence:Starting position on NM_000185.4970
  source 1..23: mol_type = mRNA
gacacacaaccacaacttccggc

SEQ ID NO: 91 - RNA, 23 nt, Homo sapiens
  misc_feature 1..23: note = Origin of RNA sequence:Starting position on NM_000185.4972
  source 1..23: mol_type = mRNA
cacacaaccacaacttccggctg

SEQ ID NO: 92 - RNA, 23 nt, Homo sapiens
  misc_feature 1..23: note = Origin of RNA sequence:Starting position on NM_000185.4406
  source 1..23: mol_type = mRNA
caagagccggatccagcgtctta

SEQ ID NO: 93 - RNA, 23 nt, Homo sapiens
  misc_feature 1..23: note = Origin of RNA sequence:Starting position on NM_000185.4973
  source 1..23: mol_type = mRNA
acacaaccacaacttccggctga

SEQ ID NO: 94 - RNA, 23 nt, Homo sapiens
  misc_feature 1..23: note = Origin of RNA sequence:Starting position on NM_000185.41347
  source 1..23: mol_type = mRNA
ccatcgacctgttcaagcaccaa

SEQ ID NO: 95 - RNA, 23 nt, Homo sapiens
  misc_feature 1..23: note = Origin of RNA sequence:Starting position on NM_000185.41175
  source 1..23: mol_type = mRNA
cgggtggtggagagatggcaaaa

SEQ ID NO: 96 - RNA, 23 nt, Homo sapiens
  misc_feature 1..23: note = Origin of RNA sequence:Starting position on NM_000185.41440
  source 1..23: mol_type = mRNA
ccacccaagtccgcttcactgtc

SEQ ID NO: 97 - RNA, 23 nt, Homo sapiens
  misc_feature 1..23: note = Origin of RNA sequence:Starting position on NM_000185.41199
  source 1..23: mol_type = mRNA
agcatgacaaacagaactcgaga

SEQ ID NO: 98 - RNA, 23 nt, Homo sapiens
  misc_feature 1..23: note = Origin of RNA sequence:Starting position on NM_000185.4409
  source 1..23: mol_type = mRNA
gagccggatccagcgtcttaaca

SEQ ID NO: 99 - RNA, 23 nt, Homo sapiens
  misc_feature 1..23: note = Origin of RNA sequence:Starting position on NM_000185.4403
  source 1..23: mol_type = mRNA
tggcaagagccggatccagcgtc

SEQ ID NO: 100 - RNA, 23 nt, Homo sapiens
  misc_feature 1..23: note = Origin of RNA sequence:Starting position on NM_000185.4402
  source 1..23: mol_type = mRNA
atggcaagagccggatccagcgt

SEQ ID NO: 101 - RNA, 23 nt, Homo sapiens
  misc_feature 1..23: note = Origin of RNA sequence:Starting position on NM_000185.41420
  source 1..23: mol_type = mRNA
ggtggggttcatgccgctgtcca

SEQ ID NO: 102 - RNA, 19 nt, Homo sapiens
  misc_feature 1..19: note = Origin of RNA sequence:Starting position on NM_000185.4950
  source 1..19: mol_type = mRNA
aataaattcccagtggaaa

SEQ ID NO: 103 - RNA, 19 nt, Homo sapiens
  misc_feature 1..19: note = Origin of RNA sequence:Starting position on NM_000185.4924
  source 1..19: mol_type = mRNA
gcatctacttcaaaggatc

SEQ ID NO: 104 - RNA, 19 nt, Homo sapiens
  misc_feature 1..19: note = Origin of RNA sequence:Starting position on NM_000185.4923
  source 1..19: mol_type = mRNA
tgcatctacttcaaaggat

SEQ ID NO: 105 - RNA, 19 nt, Homo sapiens
  misc_feature 1..19: note = Origin of RNA sequence:Starting position on NM_000185.4561
  source 1..19: mol_type = mRNA
gagagacccatgaacaagt

SEQ ID NO: 106 - RNA, 19 nt, Homo sapiens
  misc_feature 1..19: note = Origin of RNA sequence:Starting position on NM_000185.4948
  source 1..19: mol_type = mRNA
tgaataaattcccagtgga

SEQ ID NO: 107 - RNA, 19 nt, Homo sapiens
  misc_feature 1..19: note = Origin of RNA sequence:Starting position on NM_000185.4680
  source 1..19: mol_type = mRNA
aggaggaattttgggtaca

SEQ ID NO: 108 - RNA, 19 nt, Homo sapiens
  misc_feature 1..19: note = Origin of RNA sequence:Starting position on NM_000185.41505
  source 1..19: mol_type = mRNA
tgcctgctcttcatgggaa

SEQ ID NO: 109 - RNA, 19 nt, Homo sapiens
  misc_feature 1..19: note = Origin of RNA sequence:Starting position on NM_000185.4858
  source 1..19: mol_type = mRNA
ccaagggcctcataaaaga

SEQ ID NO: 110 - RNA, 19 nt, Homo sapiens
  misc_feature 1..19: note = Origin of RNA sequence:Starting position on NM_000185.4720
  source 1..19: mol_type = mRNA
tttatatccagaagcagtt

SEQ ID NO: 111 - RNA, 19 nt, Homo sapiens
  misc_feature 1..19: note = Origin of RNA sequence:Starting position on NM_000185.4921
  source 1..19: mol_type = mRNA
actgcatctacttcaaagg

SEQ ID NO: 112 - RNA, 19 nt, Homo sapiens
  misc_feature 1..19: note = Origin of RNA sequence:Starting position on NM_000185.4411
  source 1..19: mol_type = mRNA
gccggatccagcgtcttaa

SEQ ID NO: 113 - RNA, 19 nt, Homo sapiens
  misc_feature 1..19: note = Origin of RNA sequence:Starting position on NM_000185.4418
  source 1..19: mol_type = mRNA
ccagcgtcttaacatcctc

SEQ ID NO: 114 - RNA, 19 nt, Homo sapiens
  misc_feature 1..19: note = Origin of RNA sequence:Starting position on NM_000185.41195
  source 1..19: mol_type = mRNA
aaaaagcatgacaaacaga

SEQ ID NO: 115 - RNA, 19 nt, Homo sapiens
  misc_feature 1..19: note = Origin of RNA sequence:Starting position on NM_000185.4681
  source 1..19: mol_type = mRNA
ggaggaattttgggtacac

SEQ ID NO: 116 - RNA, 19 nt, Homo sapiens
  misc_feature 1..19: note = Origin of RNA sequence:Starting position on NM_000185.4978
  source 1..19: mol_type = mRNA
accacaacttccggctgaa

SEQ ID NO: 117 - RNA, 19 nt, Homo sapiens
  misc_feature 1..19: note = Origin of RNA sequence:Starting position on NM_000185.41193
  source 1..19: mol_type = mRNA
caaaaaagcatgacaaaca

SEQ ID NO: 118 - RNA, 19 nt, Homo sapiens
  misc_feature 1..19: note = Origin of RNA sequence:Starting position on NM_000185.4951
  source 1..19: mol_type = mRNA
ataaattcccagtggaaat

SEQ ID NO: 119 - RNA, 19 nt, Homo sapiens
  misc_feature 1..19: note = Origin of RNA sequence:Starting position on NM_000185.41104
  source 1..19: mol_type = mRNA
gcatcagcatgctaattgt

SEQ ID NO: 120 - RNA, 19 nt, Homo sapiens
  misc_feature 1..19: note = Origin of RNA sequence:Starting position on NM_000185.41197
  source 1..19: mol_type = mRNA
aaagcatgacaaacagaac

SEQ ID NO: 121 - RNA, 19 nt, Homo sapiens
  misc_feature 1..19: note = Origin of RNA sequence:Starting position on NM_000185.4775
  source 1..19: mol_type = mRNA
gtattactttgctgaggcc

SEQ ID NO: 122 - RNA, 23 nt, synthetic construct
  misc_feature 1..23: note = Origin of RNA sequence: first (antisense) strand baseCorresponding positions on NM_000185.4946-967
  source 1..23: mol_type = other RNA
tttccactgggaatttattcacc

SEQ ID NO: 123 - RNA, 23 nt, synthetic construct
  misc_feature 1..23: note = Origin of RNA sequence: first (antisense) strand baseCorresponding positions on NM_000185.4920-941
  source 1..23: mol_type = other RNA
gatcctttgaagtagatgcagtt

SEQ ID NO: 124 - RNA, 23 nt, synthetic construct
  misc_feature 1..23: note = Origin of RNA sequence: first (antisense) strand baseCorresponding positions on NM_000185.4919-940
  source 1..23: mol_type = other RNA
atcctttgaagtagatgcagttg

SEQ ID NO: 125 - RNA, 23 nt, synthetic construct
  misc_feature 1..23: note = Origin of RNA sequence: first (antisense) strand baseCorresponding positions on NM_000185.4557-578
  source 1..23: mol_type = other RNA
acttgttcatgggtctctccctt

SEQ ID NO: 126 - RNA, 23 nt, synthetic construct
  misc_feature 1..23: note = Origin of RNA sequence: first (antisense) strand baseCorresponding positions on NM_000185.4944-965
  source 1..23: mol_type = other RNA
tccactgggaatttattcaccca

SEQ ID NO: 127 - RNA, 23 nt, synthetic construct
  misc_feature 1..23: note = Origin of RNA sequence: first (antisense) strand baseCorresponding positions on NM_000185.4676-697
  source 1..23: mol_type = other RNA
tgtacccaaaattcctcctgaag

SEQ ID NO: 128 - RNA, 23 nt, synthetic construct
  misc_feature 1..23: note = Origin of RNA sequence: first (antisense) strand baseCorresponding positions on NM_000185.41501-1522
  source 1..23: mol_type = other RNA
ttcccatgaagagcaggcagctg

SEQ ID NO: 129 - RNA, 23 nt, synthetic construct
  misc_feature 1..23: note = Origin of RNA sequence: first (antisense) strand baseCorresponding positions on NM_000185.4854-875
  source 1..23: mol_type = other RNA
tcttttatgaggcccttggtgag

SEQ ID NO: 130 - RNA, 23 nt, synthetic construct
  misc_feature 1..23: note = Origin of RNA sequence: first (antisense) strand baseCorresponding positions on NM_000185.4716-737
  source 1..23: mol_type = other RNA
aactgcttctggatataaaggtc

SEQ ID NO: 131 - RNA, 23 nt, synthetic construct
  misc_feature 1..23: note = Origin of RNA sequence: first (antisense) strand baseCorresponding positions on NM_000185.4917-938
  source 1..23: mol_type = other RNA
cctttgaagtagatgcagttgag

SEQ ID NO: 132 - RNA, 23 nt, synthetic construct
  misc_feature 1..23: note = Origin of RNA sequence: first (antisense) strand baseCorresponding positions on NM_000185.4407-428
  source 1..23: mol_type = other RNA
ttaagacgctggatccggctctt

SEQ ID NO: 133 - RNA, 23 nt, synthetic construct
  misc_feature 1..23: note = Origin of RNA sequence: first (antisense) strand baseCorresponding positions on NM_000185.4414-435
  source 1..23: mol_type = other RNA
gaggatgttaagacgctggatcc

SEQ ID NO: 134 - RNA, 23 nt, synthetic construct
  misc_feature 1..23: note = Origin of RNA sequence: first (antisense) strand baseCorresponding positions on NM_000185.41191-1212
  source 1..23: mol_type = other RNA
tctgtttgtcatgcttttttgcc

SEQ ID NO: 135 - RNA, 23 nt, synthetic construct
  misc_feature 1..23: note = Origin of RNA sequence: first (antisense) strand baseCorresponding positions on NM_000185.4677-698
  source 1..23: mol_type = other RNA
gtgtacccaaaattcctcctgaa

SEQ ID NO: 136 - RNA, 23 nt, synthetic construct
  misc_feature 1..23: note = Origin of RNA sequence: first (antisense) strand baseCorresponding positions on NM_000185.4974-995
  source 1..23: mol_type = other RNA
ttcagccggaagttgtggttgtg

SEQ ID NO: 137 - RNA, 23 nt, synthetic construct
  misc_feature 1..23: note = Origin of RNA sequence: first (antisense) strand baseCorresponding positions on NM_000185.41189-1210
  source 1..23: mol_type = other RNA
tgtttgtcatgcttttttgccat

SEQ ID NO: 138 - RNA, 23 nt, synthetic construct
  misc_feature 1..23: note = Origin of RNA sequence: first (antisense) strand baseCorresponding positions on NM_000185.4947-968
  source 1..23: mol_type = other RNA
atttccactgggaatttattcac

SEQ ID NO: 139 - RNA, 23 nt, synthetic construct
  misc_feature 1..23: note = Origin of RNA sequence: first (antisense) strand baseCorresponding positions on NM_000185.41100-1121
  source 1..23: mol_type = other RNA
acaattagcatgctgatgccccc

SEQ ID NO: 140 - RNA, 23 nt, synthetic construct
  misc_feature 1..23: note = Origin of RNA sequence: first (antisense) strand baseCorresponding positions on NM_000185.41193-1214
  source 1..23: mol_type = other RNA
gttctgtttgtcatgcttttttg

SEQ ID NO: 141 - RNA, 23 nt, synthetic construct
  misc_feature 1..23: note = Origin of RNA sequence: first (antisense) strand baseCorresponding positions on NM_000185.4771-792
  source 1..23: mol_type = other RNA
ggcctcagcaaagtaatactctc

SEQ ID NO: 142 - RNA, 23 nt, synthetic construct
  misc_feature 1..23: note = Origin of RNA sequence: first (antisense) strand baseCorresponding positions on NM_000185.4543-564
  source 1..23: mol_type = other RNA
ctctcccttcagacctaaggaaa

SEQ ID NO: 143 - RNA, 23 nt, synthetic construct
  misc_feature 1..23: note = Origin of RNA sequence: first (antisense) strand baseCorresponding positions on NM_000185.41346-1367
  source 1..23: mol_type = other RNA
tggtgcttgaacaggtcgatggc

SEQ ID NO: 144 - RNA, 23 nt, synthetic construct
  misc_feature 1..23: note = Origin of RNA sequence: first (antisense) strand baseCorresponding positions on NM_000185.4853-874
  source 1..23: mol_type = other RNA
cttttatgaggcccttggtgagc

SEQ ID NO: 145 - RNA, 23 nt, synthetic construct
  misc_feature 1..23: note = Origin of RNA sequence: first (antisense) strand baseCorresponding positions on NM_000185.4948-969
  source 1..23: mol_type = other RNA
catttccactgggaatttattca

SEQ ID NO: 146 - RNA, 23 nt, synthetic construct
  misc_feature 1..23: note = Origin of RNA sequence: first (antisense) strand baseCorresponding positions on NM_000185.41190-1211
  source 1..23: mol_type = other RNA
ctgtttgtcatgcttttttgcca

SEQ ID NO: 147 - RNA, 23 nt, synthetic construct
  misc_feature 1..23: note = Origin of RNA sequence: first (antisense) strand baseCorresponding positions on NM_000185.4984-1005
  source 1..23: mol_type = other RNA
ctctctctcattcagccggaagt

SEQ ID NO: 148 - RNA, 23 nt, synthetic construct
  misc_feature 1..23: note = Origin of RNA sequence: first (antisense) strand baseCorresponding positions on NM_000185.41198-1219
  source 1..23: mol_type = other RNA
ctcgagttctgtttgtcatgctt

SEQ ID NO: 149 - RNA, 23 nt, synthetic construct
  misc_feature 1..23: note = Origin of RNA sequence: first (antisense) strand baseCorresponding positions on NM_000185.41506-1527
  source 1..23: mol_type = other RNA
cactcttcccatgaagagcaggc

SEQ ID NO: 150 - RNA, 23 nt, synthetic construct
  misc_feature 1..23: note = Origin of RNA sequence: first (antisense) strand baseCorresponding positions on NM_000185.4770-791
  source 1..23: mol_type = other RNA
gcctcagcaaagtaatactctct

SEQ ID NO: 151 - RNA, 23 nt, synthetic construct
  misc_feature 1..23: note = Origin of RNA sequence: first (antisense) strand baseCorresponding positions on NM_000185.4674-695
  source 1..23: mol_type = other RNA
tacccaaaattcctcctgaagag

SEQ ID NO: 152 - RNA, 23 nt, synthetic construct
  misc_feature 1..23: note = Origin of RNA sequence: first (antisense) strand baseCorresponding positions on NM_000185.41196-1217
  source 1..23: mol_type = other RNA
cgagttctgtttgtcatgctttt

SEQ ID NO: 153 - RNA, 23 nt, synthetic construct
  misc_feature 1..23: note = Origin of RNA sequence: first (antisense) strand baseCorresponding positions on NM_000185.4945-966
  source 1..23: mol_type = other RNA
ttccactgggaatttattcaccc

SEQ ID NO: 154 - RNA, 23 nt, synthetic construct
  misc_feature 1..23: note = Origin of RNA sequence: first (antisense) strand baseCorresponding positions on NM_000185.4412-433
  source 1..23: mol_type = other RNA
ggatgttaagacgctggatccgg

SEQ ID NO: 155 - RNA, 23 nt, synthetic construct
  misc_feature 1..23: note = Origin of RNA sequence: first (antisense) strand baseCorresponding positions on NM_000185.41202-1223
  source 1..23: mol_type = other RNA
acttctcgagttctgtttgtcat

SEQ ID NO: 156 - RNA, 23 nt, synthetic construct
  misc_feature 1..23: note = Origin of RNA sequence: first (antisense) strand baseCorresponding positions on NM_000185.41326-1347
  source 1..23: mol_type = other RNA
ggcgatcctttggtctgagatgc

SEQ ID NO: 157 - RNA, 23 nt, synthetic construct
  misc_feature 1..23: note = Origin of RNA sequence: first (antisense) strand baseCorresponding positions on NM_000185.4980-1001
  source 1..23: mol_type = other RNA
ctctcattcagccggaagttgtg

SEQ ID NO: 158 - RNA, 23 nt, synthetic construct
  misc_feature 1..23: note = Origin of RNA sequence: first (antisense) strand baseCorresponding positions on NM_000185.4675-696
  source 1..23: mol_type = other RNA
gtacccaaaattcctcctgaaga

SEQ ID NO: 159 - RNA, 23 nt, synthetic construct
  misc_feature 1..23: note = Origin of RNA sequence: first (antisense) strand baseCorresponding positions on NM_000185.4769-790
  source 1..23: mol_type = other RNA
cctcagcaaagtaatactctctt

SEQ ID NO: 160 - RNA, 23 nt, synthetic construct
  misc_feature 1..23: note = Origin of RNA sequence: first (antisense) strand baseCorresponding positions on NM_000185.4977-998
  source 1..23: mol_type = other RNA
tcattcagccggaagttgtggtt

SEQ ID NO: 161 - RNA, 23 nt, synthetic construct
  misc_feature 1..23: note = Origin of RNA sequence: first (antisense) strand baseCorresponding positions on NM_000185.4411-432
  source 1..23: mol_type = other RNA
gatgttaagacgctggatccggc

SEQ ID NO: 162 - RNA, 23 nt, synthetic construct
  misc_feature 1..23: note = Origin of RNA sequence: first (antisense) strand baseCorresponding positions on NM_000185.4914-935
  source 1..23: mol_type = other RNA
ttgaagtagatgcagttgagaat

SEQ ID NO: 163 - RNA, 23 nt, synthetic construct
  misc_feature 1..23: note = Origin of RNA sequence: first (antisense) strand baseCorresponding positions on NM_000185.41324-1345
  source 1..23: mol_type = other RNA
cgatcctttggtctgagatgcct

SEQ ID NO: 164 - RNA, 23 nt, synthetic construct
  misc_feature 1..23: note = Origin of RNA sequence: first (antisense) strand baseCorresponding positions on NM_000185.41195-1216
  source 1..23: mol_type = other RNA
gagttctgtttgtcatgcttttt

SEQ ID NO: 165 - RNA, 23 nt, synthetic construct
  misc_feature 1..23: note = Origin of RNA sequence: first (antisense) strand baseCorresponding positions on NM_000185.4878-899
  source 1..23: mol_type = other RNA
gcagggtctatattctccagagc

SEQ ID NO: 166 - RNA, 23 nt, synthetic construct
  misc_feature 1..23: note = Origin of RNA sequence: first (antisense) strand baseCorresponding positions on NM_000185.4768-789
  source 1..23: mol_type = other RNA
ctcagcaaagtaatactctctta

SEQ ID NO: 167 - RNA, 23 nt, synthetic construct
  misc_feature 1..23: note = Origin of RNA sequence: first (antisense) strand baseCorresponding positions on NM_000185.4986-1007
  source 1..23: mol_type = other RNA
acctctctctcattcagccggaa

SEQ ID NO: 168 - RNA, 23 nt, synthetic construct
  misc_feature 1..23: note = Origin of RNA sequence: first (antisense) strand baseCorresponding positions on NM_000185.4940-961
  source 1..23: mol_type = other RNA
ctgggaatttattcacccaggat

SEQ ID NO: 169 - RNA, 23 nt, synthetic construct
  misc_feature 1..23: note = Origin of RNA sequence: first (antisense) strand baseCorresponding positions on NM_000185.4545-566
  source 1..23: mol_type = other RNA
gtctctcccttcagacctaagga

SEQ ID NO: 170 - RNA, 23 nt, synthetic construct
  misc_feature 1..23: note = Origin of RNA sequence: first (antisense) strand baseCorresponding positions on NM_000185.4983-1004
  source 1..23: mol_type = other RNA
tctctctcattcagccggaagtt

SEQ ID NO: 171 - RNA, 23 nt, synthetic construct
  misc_feature 1..23: note = Origin of RNA sequence: first (antisense) strand baseCorresponding positions on NM_000185.4950-971
  source 1..23: mol_type = other RNA
gtcatttccactgggaatttatt

SEQ ID NO: 172 - RNA, 23 nt, synthetic construct
  misc_feature 1..23: note = Origin of RNA sequence: first (antisense) strand baseCorresponding positions on NM_000185.4975-996
  source 1..23: mol_type = other RNA
attcagccggaagttgtggttgt

SEQ ID NO: 173 - RNA, 23 nt, synthetic construct
  misc_feature 1..23: note = Origin of RNA sequence: first (antisense) strand baseCorresponding positions on NM_000185.4881-902
  source 1..23: mol_type = other RNA
gtagcagggtctatattctccag

SEQ ID NO: 174 - RNA, 23 nt, synthetic construct
  misc_feature 1..23: note = Origin of RNA sequence: first (antisense) strand baseCorresponding positions on NM_000185.41345-1366
  source 1..23: mol_type = other RNA
ggtgcttgaacaggtcgatggcg

SEQ ID NO: 175 - RNA, 23 nt, synthetic construct
  misc_feature 1..23: note = Origin of RNA sequence: first (antisense) strand baseCorresponding positions on NM_000185.4913-934
  source 1..23: mol_type = other RNA
tgaagtagatgcagttgagaatc

SEQ ID NO: 176 - RNA, 23 nt, synthetic construct
  misc_feature 1..23: note = Origin of RNA sequence: first (antisense) strand baseCorresponding positions on NM_000185.4415-436
  source 1..23: mol_type = other RNA
tgaggatgttaagacgctggatc

SEQ ID NO: 177 - RNA, 23 nt, synthetic construct
  misc_feature 1..23: note = Origin of RNA sequence: first (antisense) strand baseCorresponding positions on NM_000185.41322-1343
  source 1..23: mol_type = other RNA
atcctttggtctgagatgcctgc

SEQ ID NO: 178 - RNA, 23 nt, synthetic construct
  misc_feature 1..23: note = Origin of RNA sequence: first (antisense) strand baseCorresponding positions on NM_000185.41430-1451
  source 1..23: mol_type = other RNA
cggacttgggtggacagcggcat

SEQ ID NO: 179 - RNA, 23 nt, synthetic construct
  misc_feature 1..23: note = Origin of RNA sequence: first (antisense) strand baseCorresponding positions on NM_000185.41200-1221
  source 1..23: mol_type = other RNA
ttctcgagttctgtttgtcatgc

SEQ ID NO: 180 - RNA, 23 nt, synthetic construct
  misc_feature 1..23: note = Origin of RNA sequence: first (antisense) strand baseCorresponding positions on NM_000185.41421-1442
  source 1..23: mol_type = other RNA
gtggacagcggcatgaaccccac

SEQ ID NO: 181 - RNA, 23 nt, synthetic construct
  misc_feature 1..23: note = Origin of RNA sequence: first (antisense) strand baseCorresponding positions on NM_000185.4413-434
  source 1..23: mol_type = other RNA
aggatgttaagacgctggatccg

SEQ ID NO: 182 - RNA, 23 nt, synthetic construct
  misc_feature 1..23: note = Origin of RNA sequence: first (antisense) strand baseCorresponding positions on NM_000185.41441-1462
  source 1..23: mol_type = other RNA
cgacagtgaagcggacttgggtg

SEQ ID NO: 183 - RNA, 23 nt, synthetic construct
  misc_feature 1..23: note = Origin of RNA sequence: first (antisense) strand baseCorresponding positions on NM_000185.4982-1003
  source 1..23: mol_type = other RNA
ctctctcattcagccggaagttg

SEQ ID NO: 184 - RNA, 23 nt, synthetic construct
  misc_feature 1..23: note = Origin of RNA sequence: first (antisense) strand baseCorresponding positions on NM_000185.4774-795
  source 1..23: mol_type = other RNA
ctgggcctcagcaaagtaatact

SEQ ID NO: 185 - RNA, 23 nt, synthetic construct
  misc_feature 1..23: note = Origin of RNA sequence: first (antisense) strand baseCorresponding positions on NM_000185.4879-900
  source 1..23: mol_type = other RNA
agcagggtctatattctccagag

SEQ ID NO: 186 - RNA, 23 nt, synthetic construct
  misc_feature 1..23: note = Origin of RNA sequence: first (antisense) strand baseCorresponding positions on NM_000185.4910-931
  source 1..23: mol_type = other RNA
agtagatgcagttgagaatcatc

SEQ ID NO: 187 - RNA, 23 nt, synthetic construct
  misc_feature 1..23: note = Origin of RNA sequence: first (antisense) strand baseCorresponding positions on NM_000185.41429-1450
  source 1..23: mol_type = other RNA
ggacttgggtggacagcggcatg

SEQ ID NO: 188 - RNA, 23 nt, synthetic construct
  misc_feature 1..23: note = Origin of RNA sequence: first (antisense) strand baseCorresponding positions on NM_000185.4915-936
  source 1..23: mol_type = other RNA
tttgaagtagatgcagttgagaa

SEQ ID NO: 189 - RNA, 23 nt, synthetic construct
  misc_feature 1..23: note = Origin of RNA sequence: first (antisense) strand baseCorresponding positions on NM_000185.4976-997
  source 1..23: mol_type = other RNA
cattcagccggaagttgtggttg

SEQ ID NO: 190 - RNA, 23 nt, synthetic construct
  misc_feature 1..23: note = Origin of RNA sequence: first (antisense) strand baseCorresponding positions on NM_000185.41417-1438
  source 1..23: mol_type = other RNA
acagcggcatgaaccccaccgtg

SEQ ID NO: 191 - RNA, 23 nt, synthetic construct
  misc_feature 1..23: note = Origin of RNA sequence: first (antisense) strand baseCorresponding positions on NM_000185.4985-1006
  source 1..23: mol_type = other RNA
cctctctctcattcagccggaag

SEQ ID NO: 192 - RNA, 23 nt, synthetic construct
  misc_feature 1..23: note = Origin of RNA sequence: first (antisense) strand baseCorresponding positions on NM_000185.4673-694
  source 1..23: mol_type = other RNA
acccaaaattcctcctgaagagg

SEQ ID NO: 193 - RNA, 23 nt, synthetic construct
  misc_feature 1..23: note = Origin of RNA sequence: first (antisense) strand baseCorresponding positions on NM_000185.4773-794
  source 1..23: mol_type = other RNA
tgggcctcagcaaagtaatactc

SEQ ID NO: 194 - RNA, 23 nt, synthetic construct
  misc_feature 1..23: note = Origin of RNA sequence: first (antisense) strand baseCorresponding positions on NM_000185.4911-932
  source 1..23: mol_type = other RNA
aagtagatgcagttgagaatcat

SEQ ID NO: 195 - RNA, 23 nt, synthetic construct
  misc_feature 1..23: note = Origin of RNA sequence: first (antisense) strand baseCorresponding positions on NM_000185.41325-1346
  source 1..23: mol_type = other RNA
gcgatcctttggtctgagatgcc

SEQ ID NO: 196 - RNA, 23 nt, synthetic construct
  misc_feature 1..23: note = Origin of RNA sequence: first (antisense) strand baseCorresponding positions on NM_000185.41323-1344
  source 1..23: mol_type = other RNA
gatcctttggtctgagatgcctg

SEQ ID NO: 197 - RNA, 23 nt, synthetic construct
  misc_feature 1..23: note = Origin of RNA sequence: first (antisense) strand baseCorresponding positions on NM_000185.4916-937
  source 1..23: mol_type = other RNA
ctttgaagtagatgcagttgaga

SEQ ID NO: 198 - RNA, 23 nt, synthetic construct
  misc_feature 1..23: note = Origin of RNA sequence: first (antisense) strand baseCorresponding positions on NM_000185.41443-1464
  source 1..23: mol_type = other RNA
gtcgacagtgaagcggacttggg

SEQ ID NO: 199 - RNA, 23 nt, synthetic construct
  misc_feature 1..23: note = Origin of RNA sequence: first (antisense) strand baseCorresponding positions on NM_000185.41099-1120
  source 1..23: mol_type = other RNA
caattagcatgctgatgcccccc

SEQ ID NO: 200 - RNA, 23 nt, synthetic construct
  misc_feature 1..23: note = Origin of RNA sequence: first (antisense) strand baseCorresponding positions on NM_000185.4772-793
  source 1..23: mol_type = other RNA
gggcctcagcaaagtaatactct

SEQ ID NO: 201 - RNA, 23 nt, synthetic construct
  misc_feature 1..23: note = Origin of RNA sequence: first (antisense) strand baseCorresponding positions on NM_000185.41418-1439
  source 1..23: mol_type = other RNA
gacagcggcatgaaccccaccgt

SEQ ID NO: 202 - RNA, 23 nt, synthetic construct
  misc_feature 1..23: note = Origin of RNA sequence: first (antisense) strand baseCorresponding positions on NM_000185.41497-1518
  source 1..23: mol_type = other RNA
catgaagagcaggcagctggtgc

SEQ ID NO: 203 - RNA, 23 nt, synthetic construct
  misc_feature 1..23: note = Origin of RNA sequence: first (antisense) strand baseCorresponding positions on NM_000185.4942-963
  source 1..23: mol_type = other RNA
cactgggaatttattcacccagg

SEQ ID NO: 204 - RNA, 23 nt, synthetic construct
  misc_feature 1..23: note = Origin of RNA sequence: first (antisense) strand baseCorresponding positions on NM_000185.41192-1213
  source 1..23: mol_type = other RNA
ttctgtttgtcatgcttttttgc

SEQ ID NO: 205 - RNA, 23 nt, synthetic construct
  misc_feature 1..23: note = Origin of RNA sequence: first (antisense) strand baseCorresponding positions on NM_000185.41442-1463
  source 1..23: mol_type = other RNA
tcgacagtgaagcggacttgggt

SEQ ID NO: 206 - RNA, 23 nt, synthetic construct
  misc_feature 1..23: note = Origin of RNA sequence: first (antisense) strand baseCorresponding positions on NM_000185.4405-426
  source 1..23: mol_type = other RNA
aagacgctggatccggctcttgc

SEQ ID NO: 207 - RNA, 23 nt, synthetic construct
  misc_feature 1..23: note = Origin of RNA sequence: first (antisense) strand baseCorresponding positions on NM_000185.41194-1215
  source 1..23: mol_type = other RNA
agttctgtttgtcatgctttttt

SEQ ID NO: 208 - RNA, 23 nt, synthetic construct
  misc_feature 1..23: note = Origin of RNA sequence: first (antisense) strand baseCorresponding positions on NM_000185.41426-1447
  source 1..23: mol_type = other RNA
cttgggtggacagcggcatgaac

SEQ ID NO: 209 - RNA, 23 nt, synthetic construct
  misc_feature 1..23: note = Origin of RNA sequence: first (antisense) strand baseCorresponding positions on NM_000185.41197-1218
  source 1..23: mol_type = other RNA
tcgagttctgtttgtcatgcttt

SEQ ID NO: 210 - RNA, 23 nt, synthetic construct
  misc_feature 1..23: note = Origin of RNA sequence: first (antisense) strand baseCorresponding positions on NM_000185.4970-991
  source 1..23: mol_type = other RNA
gccggaagttgtggttgtgtgtc

SEQ ID NO: 211 - RNA, 23 nt, synthetic construct
  misc_feature 1..23: note = Origin of RNA sequence: first (antisense) strand baseCorresponding positions on NM_000185.4972-993
  source 1..23: mol_type = other RNA
cagccggaagttgtggttgtgtg

SEQ ID NO: 212 - RNA, 23 nt, synthetic construct
  misc_feature 1..23: note = Origin of RNA sequence: first (antisense) strand baseCorresponding positions on NM_000185.4406-427
  source 1..23: mol_type = other RNA
taagacgctggatccggctcttg

SEQ ID NO: 213 - RNA, 23 nt, synthetic construct
  misc_feature 1..23: note = Origin of RNA sequence: first (antisense) strand baseCorresponding positions on NM_000185.4973-994
  source 1..23: mol_type = other RNA
tcagccggaagttgtggttgtgt

SEQ ID NO: 214 - RNA, 23 nt, synthetic construct
  misc_feature 1..23: note = Origin of RNA sequence: first (antisense) strand baseCorresponding positions on NM_000185.41347-1368
  source 1..23: mol_type = other RNA
ttggtgcttgaacaggtcgatgg

SEQ ID NO: 215 - RNA, 23 nt, synthetic construct
  misc_feature 1..23: note = Origin of RNA sequence: first (antisense) strand baseCorresponding positions on NM_000185.41175-1196
  source 1..23: mol_type = other RNA
ttttgccatctctccaccacccg

SEQ ID NO: 216 - RNA, 23 nt, synthetic construct
  misc_feature 1..23: note = Origin of RNA sequence: first (antisense) strand baseCorresponding positions on NM_000185.41440-1461
  source 1..23: mol_type = other RNA
gacagtgaagcggacttgggtgg

SEQ ID NO: 217 - RNA, 23 nt, synthetic construct
  misc_feature 1..23: note = Origin of RNA sequence: first (antisense) strand baseCorresponding positions on NM_000185.41199-1220
  source 1..23: mol_type = other RNA
tctcgagttctgtttgtcatgct

SEQ ID NO: 218 - RNA, 23 nt, synthetic construct
  misc_feature 1..23: note = Origin of RNA sequence: first (antisense) strand baseCorresponding positions on NM_000185.4409-430
  source 1..23: mol_type = other RNA
tgttaagacgctggatccggctc

SEQ ID NO: 219 - RNA, 23 nt, synthetic construct
  misc_feature 1..23: note = Origin of RNA sequence: first (antisense) strand baseCorresponding positions on NM_000185.4403-424
  source 1..23: mol_type = other RNA
gacgctggatccggctcttgcca

SEQ ID NO: 220 - RNA, 23 nt, synthetic construct
  misc_feature 1..23: note = Origin of RNA sequence: first (antisense) strand baseCorresponding positions on NM_000185.4402-423
  source 1..23: mol_type = other RNA
acgctggatccggctcttgccat

SEQ ID NO: 221 - RNA, 23 nt, synthetic construct
  misc_feature 1..23: note = Origin of RNA sequence: first (antisense) strand baseCorresponding positions on NM_000185.41420-1441
  source 1..23: mol_type = other RNA
tggacagcggcatgaaccccacc

SEQ ID NO: 222 - RNA, 19 nt, synthetic construct
  misc_feature 1..19: note = Origin of RNA sequence: first (antisense) strand baseCorresponding positions on NM_000185.4950-969
  source 1..19: mol_type = other RNA
tttccactgggaatttatt

SEQ ID NO: 223 - RNA, 19 nt, synthetic construct
  misc_feature 1..19: note = Origin of RNA sequence: first (antisense) strand baseCorresponding positions on NM_000185.4924-943
  source 1..19: mol_type = other RNA
gatcctttgaagtagatgc

SEQ ID NO: 224 - RNA, 19 nt, synthetic construct
  misc_feature 1..19: note = Origin of RNA sequence: first (antisense) strand baseCorresponding positions on NM_000185.4923-942
  source 1..19: mol_type = other RNA
atcctttgaagtagatgca

SEQ ID NO: 225 - RNA, 19 nt, synthetic construct
  misc_feature 1..19: note = Origin of RNA sequence: first (antisense) strand baseCorresponding positions on NM_000185.4561-580
  source 1..19: mol_type = other RNA
acttgttcatgggtctctc

SEQ ID NO: 226 - RNA, 19 nt, synthetic construct
  misc_feature 1..19: note = Origin of RNA sequence: first (antisense) strand baseCorresponding positions on NM_000185.4948-967
  source 1..19: mol_type = other RNA
tccactgggaatttattca

SEQ ID NO: 227 - RNA, 19 nt, synthetic construct
  misc_feature 1..19: note = Origin of RNA sequence: first (antisense) strand baseCorresponding positions on NM_000185.4680-699
  source 1..19: mol_type = other RNA
tgtacccaaaattcctcct

SEQ ID NO: 228 - RNA, 19 nt, synthetic construct
  misc_feature 1..19: note = Origin of RNA sequence: first (antisense) strand baseCorresponding positions on NM_000185.41505-1524
  source 1..19: mol_type = other RNA
ttcccatgaagagcaggca

SEQ ID NO: 229 - RNA, 19 nt, synthetic construct
  misc_feature 1..19: note = Origin of RNA sequence: first (antisense) strand baseCorresponding positions on NM_000185.4858-877
  source 1..19: mol_type = other RNA
tcttttatgaggcccttgg

SEQ ID NO: 230 - RNA, 19 nt, synthetic construct
  misc_feature 1..19: note = Origin of RNA sequence: first (antisense) strand baseCorresponding positions on NM_000185.4720-739
  source 1..19: mol_type = other RNA
aactgcttctggatataaa

SEQ ID NO: 231 - RNA, 19 nt, synthetic construct
  misc_feature 1..19: note = Origin of RNA sequence: first (antisense) strand baseCorresponding positions on NM_000185.4921-940
  source 1..19: mol_type = other RNA
cctttgaagtagatgcagt

SEQ ID NO: 232 - RNA, 19 nt, synthetic construct
  misc_feature 1..19: note = Origin of RNA sequence: first (antisense) strand baseCorresponding positions on NM_000185.4411-430
  source 1..19: mol_type = other RNA
ttaagacgctggatccggc

SEQ ID NO: 233 - RNA, 19 nt, synthetic construct
  misc_feature 1..19: note = Origin of RNA sequence: first (antisense) strand baseCorresponding positions on NM_000185.4418-437
  source 1..19: mol_type = other RNA
gaggatgttaagacgctgg

SEQ ID NO: 234 - RNA, 19 nt, synthetic construct
  misc_feature 1..19: note = Origin of RNA sequence: first (antisense) strand baseCorresponding positions on NM_000185.41195-1214
  source 1..19: mol_type = other RNA
tctgtttgtcatgcttttt

SEQ ID NO: 235 - RNA, 19 nt, synthetic construct
  misc_feature 1..19: note = Origin of RNA sequence: first (antisense) strand baseCorresponding positions on NM_000185.4681-700
  source 1..19: mol_type = other RNA
gtgtacccaaaattcctcc

SEQ ID NO: 236 - RNA, 19 nt, synthetic construct
  misc_feature 1..19: note = Origin of RNA sequence: first (antisense) strand baseCorresponding positions on NM_000185.4978-997
  source 1..19: mol_type = other RNA
ttcagccggaagttgtggt

SEQ ID NO: 237 - RNA, 19 nt, synthetic construct
  misc_feature 1..19: note = Origin of RNA sequence: first (antisense) strand baseCorresponding positions on NM_000185.41193-1212
  source 1..19: mol_type = other RNA
tgtttgtcatgcttttttg

SEQ ID NO: 238 - RNA, 19 nt, synthetic construct
  misc_feature 1..19: note = Origin of RNA sequence: first (antisense) strand baseCorresponding positions on NM_000185.4951-970
  source 1..19: mol_type = other RNA
atttccactgggaatttat

SEQ ID NO: 239 - RNA, 19 nt, synthetic construct
  misc_feature 1..19: note = Origin of RNA sequence: first (antisense) strand baseCorresponding positions on NM_000185.41104-1123
  source 1..19: mol_type = other RNA
acaattagcatgctgatgc

SEQ ID NO: 240 - RNA, 19 nt, synthetic construct
  misc_feature 1..19: note = Origin of RNA sequence: first (antisense) strand baseCorresponding positions on NM_000185.41197-1216
  source 1..19: mol_type = other RNA
gttctgtttgtcatgcttt

SEQ ID NO: 241 - RNA, 19 nt, synthetic construct
  misc_feature 1..19: note = Origin of RNA sequence: first (antisense) strand baseCorresponding positions on NM_000185.4775-794
  source 1..19: mol_type = other RNA
ggcctcagcaaagtaatac

SEQ ID NO: 242 - RNA, 21 nt, synthetic construct
  misc_feature 1..21: note = Origin of RNA sequence: second (sense) strand base sequence Corresponding positions on NM_000185.4946-967
  source 1..21: mol_type = other RNA
tgaataaattcccagtggaaa

SEQ ID NO: 243 - RNA, 21 nt, synthetic construct
  misc_feature 1..21: note = Origin of RNA sequence: second (sense) strand base sequence Corresponding positions on NM_000185.4920-941
  source 1..21: mol_type = other RNA
ctgcatctacttcaaaggatc

SEQ ID NO: 244 - RNA, 21 nt, synthetic construct
  misc_feature 1..21: note = Origin of RNA sequence: second (sense) strand base sequence Corresponding positions on NM_000185.4919-940
  source 1..21: mol_type = other RNA
actgcatctacttcaaaggat

SEQ ID NO: 245 - RNA, 21 nt, synthetic construct
  misc_feature 1..21: note = Origin of RNA sequence: second (sense) strand base sequence Corresponding positions on NM_000185.4557-578
  source 1..21: mol_type = other RNA
gggagagacccatgaacaagt

SEQ ID NO: 246 - RNA, 21 nt, synthetic construct
  misc_feature 1..21: note = Origin of RNA sequence: second (sense) strand base sequence Corresponding positions on NM_000185.4944-965
  source 1..21: mol_type = other RNA
ggtgaataaattcccagtgga

SEQ ID NO: 247 - RNA, 21 nt, synthetic construct
  misc_feature 1..21: note = Origin of RNA sequence: second (sense) strand base sequence Corresponding positions on NM_000185.4676-697
  source 1..21: mol_type = other RNA
tcaggaggaattttgggtaca

SEQ ID NO: 248 - RNA, 21 nt, synthetic construct
  misc_feature 1..21: note = Origin of RNA sequence: second (sense) strand base sequence Corresponding positions on NM_000185.41501-1522
  source 1..21: mol_type = other RNA
gctgcctgctcttcatgggaa

SEQ ID NO: 249 - RNA, 21 nt, synthetic construct
  misc_feature 1..21: note = Origin of RNA sequence: second (sense) strand base sequence Corresponding positions on NM_000185.4854-875
  source 1..21: mol_type = other RNA
caccaagggcctcataaaaga

SEQ ID NO: 250 - RNA, 21 nt, synthetic construct
  misc_feature 1..21: note = Origin of RNA sequence: second (sense) strand base sequence Corresponding positions on NM_000185.4716-737
  source 1..21: mol_type = other RNA
cctttatatccagaagcagtt

SEQ ID NO: 251 - RNA, 21 nt, synthetic construct
  misc_feature 1..21: note = Origin of RNA sequence: second (sense) strand base sequence Corresponding positions on NM_000185.4917-938
  source 1..21: mol_type = other RNA
caactgcatctacttcaaagg

SEQ ID NO: 252 - RNA, 21 nt, synthetic construct
  misc_feature 1..21: note = Origin of RNA sequence: second (sense) strand base sequence Corresponding positions on NM_000185.4407-428
  source 1..21: mol_type = other RNA
gagccggatccagcgtcttaa

SEQ ID NO: 253 - RNA, 21 nt, synthetic construct
  misc_feature 1..21: note = Origin of RNA sequence: second (sense) strand base sequence Corresponding positions on NM_000185.4414-435
  source 1..21: mol_type = other RNA
atccagcgtcttaacatcctc

SEQ ID NO: 254 - RNA, 21 nt, synthetic construct
  misc_feature 1..21: note = Origin of RNA sequence: second (sense) strand base sequence Corresponding positions on NM_000185.41191-1212
  source 1..21: mol_type = other RNA
caaaaaagcatgacaaacaga

SEQ ID NO: 255 - RNA, 21 nt, synthetic construct
  misc_feature 1..21: note = Origin of RNA sequence: second (sense) strand base sequence Corresponding positions on NM_000185.4677-698
  source 1..21: mol_type = other RNA
caggaggaattttgggtacac

SEQ ID NO: 256 - RNA, 21 nt, synthetic construct
  misc_feature 1..21: note = Origin of RNA sequence: second (sense) strand base sequence Corresponding positions on NM_000185.4974-995
  source 1..21: mol_type = other RNA
caaccacaacttccggctgaa

SEQ ID NO: 257 - RNA, 21 nt, synthetic construct
  misc_feature 1..21: note = Origin of RNA sequence: second (sense) strand base sequence Corresponding positions on NM_000185.41189-1210
  source 1..21: mol_type = other RNA
ggcaaaaaagcatgacaaaca

SEQ ID NO: 258 - RNA, 21 nt, synthetic construct
  misc_feature 1..21: note = Origin of RNA sequence: second (sense) strand base sequence Corresponding positions on NM_000185.4947-968
  source 1..21: mol_type = other RNA
gaataaattcccagtggaaat

SEQ ID NO: 259 - RNA, 21 nt, synthetic construct
  misc_feature 1..21: note = Origin of RNA sequence: second (sense) strand base sequence Corresponding positions on NM_000185.41100-1121
  source 1..21: mol_type = other RNA
gggcatcagcatgctaattgt

SEQ ID NO: 260 - RNA, 21 nt, synthetic construct
  misc_feature 1..21: note = Origin of RNA sequence: second (sense) strand base sequence Corresponding positions on NM_000185.41193-1214
  source 1..21: mol_type = other RNA
aaaaagcatgacaaacagaac

SEQ ID NO: 261 - RNA, 21 nt, synthetic construct
  misc_feature 1..21: note = Origin of RNA sequence: second (sense) strand base sequence Corresponding positions on NM_000185.4771-792
  source 1..21: mol_type = other RNA
gagtattactttgctgaggcc

SEQ ID NO: 262 - RNA, 21 nt, synthetic construct
  misc_feature 1..21: note = Origin of RNA sequence: second (sense) strand base sequence Corresponding positions on NM_000185.4543-564
  source 1..21: mol_type = other RNA
tccttaggtctgaagggagag

SEQ ID NO: 263 - RNA, 21 nt, synthetic construct
  misc_feature 1..21: note = Origin of RNA sequence: second (sense) strand base sequence Corresponding positions on NM_000185.41346-1367
  source 1..21: mol_type = other RNA
catcgacctgttcaagcacca

SEQ ID NO: 264 - RNA, 21 nt, synthetic construct
  misc_feature 1..21: note = Origin of RNA sequence: second (sense) strand base sequence Corresponding positions on NM_000185.4853-874
  source 1..21: mol_type = other RNA
tcaccaagggcctcataaaag

SEQ ID NO: 265 - RNA, 21 nt, synthetic construct
  misc_feature 1..21: note = Origin of RNA sequence: second (sense) strand base sequence Corresponding positions on NM_000185.4948-969
  source 1..21: mol_type = other RNA
aataaattcccagtggaaatg

SEQ ID NO: 266 - RNA, 21 nt, synthetic construct
  misc_feature 1..21: note = Origin of RNA sequence: second (sense) strand base sequence Corresponding positions on NM_000185.41190-1211
  source 1..21: mol_type = other RNA
gcaaaaaagcatgacaaacag

SEQ ID NO: 267 - RNA, 21 nt, synthetic construct
  misc_feature 1..21: note = Origin of RNA sequence: second (sense) strand base sequence Corresponding positions on NM_000185.4984-1005
  source 1..21: mol_type = other RNA
ttccggctgaatgagagagag

SEQ ID NO: 268 - RNA, 21 nt, synthetic construct
  misc_feature 1..21: note = Origin of RNA sequence: second (sense) strand base sequence Corresponding positions on NM_000185.41198-1219
  source 1..21: mol_type = other RNA
gcatgacaaacagaactcgag

SEQ ID NO: 269 - RNA, 21 nt, synthetic construct
  misc_feature 1..21: note = Origin of RNA sequence: second (sense) strand base sequence Corresponding positions on NM_000185.41506-1527
  source 1..21: mol_type = other RNA
ctgctcttcatgggaagagtg

SEQ ID NO: 270 - RNA, 21 nt, synthetic construct
  misc_feature 1..21: note = Origin of RNA sequence: second (sense) strand base sequence Corresponding positions on NM_000185.4770-791
  source 1..21: mol_type = other RNA
agagtattactttgctgaggc

SEQ ID NO: 271 - RNA, 21 nt, synthetic construct
  misc_feature 1..21: note = Origin of RNA sequence: second (sense) strand base sequence Corresponding positions on NM_000185.4674-695
  source 1..21: mol_type = other RNA
cttcaggaggaattttgggta

SEQ ID NO: 272 - RNA, 21 nt, synthetic construct
  misc_feature 1..21: note = Origin of RNA sequence: second (sense) strand base sequence Corresponding positions on NM_000185.41196-1217
  source 1..21: mol_type = other RNA
aagcatgacaaacagaactcg

SEQ ID NO: 273 - RNA, 21 nt, synthetic construct
  misc_feature 1..21: note = Origin of RNA sequence: second (sense) strand base sequence Corresponding positions on NM_000185.4945-966
  source 1..21: mol_type = other RNA
gtgaataaattcccagtggaa

SEQ ID NO: 274 - RNA, 21 nt, synthetic construct
  misc_feature 1..21: note = Origin of RNA sequence: second (sense) strand base sequence Corresponding positions on NM_000185.4412-433
  source 1..21: mol_type = other RNA
ggatccagcgtcttaacatcc

SEQ ID NO: 275 - RNA, 21 nt, synthetic construct
  misc_feature 1..21: note = Origin of RNA sequence: second (sense) strand base sequence Corresponding positions on NM_000185.41202-1223
  source 1..21: mol_type = other RNA
gacaaacagaactcgagaagt

SEQ ID NO: 276 - RNA, 21 nt, synthetic construct
  misc_feature 1..21: note = Origin of RNA sequence: second (sense) strand base sequence Corresponding positions on NM_000185.41326-1347
  source 1..21: mol_type = other RNA
atctcagaccaaaggatcgcc

SEQ ID NO: 277 - RNA, 21 nt, synthetic construct
  misc_feature 1..21: note = Origin of RNA sequence: second (sense) strand base sequence Corresponding positions on NM_000185.4980-1001
  source 1..21: mol_type = other RNA
caacttccggctgaatgagag

SEQ ID NO: 278 - RNA, 21 nt, synthetic construct
  misc_feature 1..21: note = Origin of RNA sequence: second (sense) strand base sequence Corresponding positions on NM_000185.4675-696
  source 1..21: mol_type = other RNA
ttcaggaggaattttgggtac

SEQ ID NO: 279 - RNA, 21 nt, synthetic construct
  misc_feature 1..21: note = Origin of RNA sequence: second (sense) strand base sequence Corresponding positions on NM_000185.4769-790
  source 1..21: mol_type = other RNA
gagagtattactttgctgagg

SEQ ID NO: 280 - RNA, 21 nt, synthetic construct
  misc_feature 1..21: note = Origin of RNA sequence: second (sense) strand base sequence Corresponding positions on NM_000185.4977-998
  source 1..21: mol_type = other RNA
ccacaacttccggctgaatga

SEQ ID NO: 281 - RNA, 21 nt, synthetic construct
  misc_feature 1..21: note = Origin of RNA sequence: second (sense) strand base sequence Corresponding positions on NM_000185.4411-432
  source 1..21: mol_type = other RNA
cggatccagcgtcttaacatc

SEQ ID NO: 282 - RNA, 21 nt, synthetic construct
  misc_feature 1..21: note = Origin of RNA sequence: second (sense) strand base sequence Corresponding positions on NM_000185.4914-935
  source 1..21: mol_type = other RNA
tctcaactgcatctacttcaa

SEQ ID NO: 283 - RNA, 21 nt, synthetic construct
  misc_feature 1..21: note = Origin of RNA sequence: second (sense) strand base sequence Corresponding positions on NM_000185.41324-1345
  source 1..21: mol_type = other RNA
gcatctcagaccaaaggatcg

SEQ ID NO: 284 - RNA, 21 nt, synthetic construct
  misc_feature 1..21: note = Origin of RNA sequence: second (sense) strand base sequence Corresponding positions on NM_000185.41195-1216
  source 1..21: mol_type = other RNA
aaagcatgacaaacagaactc

SEQ ID NO: 285 - RNA, 21 nt, synthetic construct
  misc_feature 1..21: note = Origin of RNA sequence: second (sense) strand base sequence Corresponding positions on NM_000185.4878-899
  source 1..21: mol_type = other RNA
tctggagaatatagaccctgc

SEQ ID NO: 286 - RNA, 21 nt, synthetic construct
  misc_feature 1..21: note = Origin of RNA sequence: second (sense) strand base sequence Corresponding positions on NM_000185.4768-789
  source 1..21: mol_type = other RNA
agagagtattactttgctgag

SEQ ID NO: 287 - RNA, 21 nt, synthetic construct
  misc_feature 1..21: note = Origin of RNA sequence: second (sense) strand base sequence Corresponding positions on NM_000185.4986-1007
  source 1..21: mol_type = other RNA
ccggctgaatgagagagaggt

SEQ ID NO: 288 - RNA, 21 nt, synthetic construct
  misc_feature 1..21: note = Origin of RNA sequence: second (sense) strand base sequence Corresponding positions on NM_000185.4940-961
  source 1..21: mol_type = other RNA
cctgggtgaataaattcccag

SEQ ID NO: 289 - RNA, 21 nt, synthetic construct
  misc_feature 1..21: note = Origin of RNA sequence: second (sense) strand base sequence Corresponding positions on NM_000185.4545-566
  source 1..21: mol_type = other RNA
cttaggtctgaagggagagac

SEQ ID NO: 290 - RNA, 21 nt, synthetic construct
  misc_feature 1..21: note = Origin of RNA sequence: second (sense) strand base sequence Corresponding positions on NM_000185.4983-1004
  source 1..21: mol_type = other RNA
cttccggctgaatgagagaga

SEQ ID NO: 291 - RNA, 21 nt, synthetic construct
  misc_feature 1..21: note = Origin of RNA sequence: second (sense) strand base sequence Corresponding positions on NM_000185.4950-971
  source 1..21: mol_type = other RNA
taaattcccagtggaaatgac

SEQ ID NO: 292 - RNA, 21 nt, synthetic construct
  misc_feature 1..21: note = Origin of RNA sequence: second (sense) strand base sequence Corresponding positions on NM_000185.4975-996
  source 1..21: mol_type = other RNA
aaccacaacttccggctgaat

SEQ ID NO: 293 - RNA, 21 nt, synthetic construct
  misc_feature 1..21: note = Origin of RNA sequence: second (sense) strand base sequence Corresponding positions on NM_000185.4881-902
  source 1..21: mol_type = other RNA
ggagaatatagaccctgctac

SEQ ID NO: 294 - RNA, 21 nt, synthetic construct
  misc_feature 1..21: note = Origin of RNA sequence: second (sense) strand base sequence Corresponding positions on NM_000185.41345-1366
  source 1..21: mol_type = other RNA
ccatcgacctgttcaagcacc

SEQ ID NO: 295 - RNA, 21 nt, synthetic construct
  misc_feature 1..21: note = Origin of RNA sequence: second (sense) strand base sequence Corresponding positions on NM_000185.4913-934
  source 1..21: mol_type = other RNA
ttctcaactgcatctacttca

SEQ ID NO: 296 - RNA, 21 nt, synthetic construct
  misc_feature 1..21: note = Origin of RNA sequence: second (sense) strand base sequence Corresponding positions on NM_000185.4415-436
  source 1..21: mol_type = other RNA
tccagcgtcttaacatcctca

SEQ ID NO: 297 - RNA, 21 nt, synthetic construct
  misc_feature 1..21: note = Origin of RNA sequence: second (sense) strand base sequence Corresponding positions on NM_000185.41322-1343
  source 1..21: mol_type = other RNA
aggcatctcagaccaaaggat

SEQ ID NO: 298 - RNA, 21 nt, synthetic construct
  misc_feature 1..21: note = Origin of RNA sequence: second (sense) strand base sequence Corresponding positions on NM_000185.41430-1451
  source 1..21: mol_type = other RNA
gccgctgtccacccaagtccg

SEQ ID NO: 299 - RNA, 21 nt, synthetic construct
  misc_feature 1..21: note = Origin of RNA sequence: second (sense) strand base sequence Corresponding positions on NM_000185.41200-1221
  source 1..21: mol_type = other RNA
atgacaaacagaactcgagaa

SEQ ID NO: 300 - RNA, 21 nt, synthetic construct
  misc_feature 1..21: note = Origin of RNA sequence: second (sense) strand base sequence Corresponding positions on NM_000185.41421-1442
  source 1..21: mol_type = other RNA
ggggttcatgccgctgtccac

SEQ ID NO: 301 - RNA, 21 nt, synthetic construct
  misc_feature 1..21: note = Origin of RNA sequence: second (sense) strand base sequence Corresponding positions on NM_000185.4413-434
  source 1..21: mol_type = other RNA
gatccagcgtcttaacatcct

SEQ ID NO: 302 - RNA, 21 nt, synthetic construct
  misc_feature 1..21: note = Origin of RNA sequence: second (sense) strand base sequence Corresponding positions on NM_000185.41441-1462
  source 1..21: mol_type = other RNA
cccaagtccgcttcactgtcg

SEQ ID NO: 303 - RNA, 21 nt, synthetic construct
  misc_feature 1..21: note = Origin of RNA sequence: second (sense) strand base sequence Corresponding positions on NM_000185.4982-1003
  source 1..21: mol_type = other RNA
acttccggctgaatgagagag

SEQ ID NO: 304 - RNA, 21 nt, synthetic construct
  misc_feature 1..21: note = Origin of RNA sequence: second (sense) strand base sequence Corresponding positions on NM_000185.4774-795
  source 1..21: mol_type = other RNA
tattactttgctgaggcccag

SEQ ID NO: 305 - RNA, 21 nt, synthetic construct
  misc_feature 1..21: note = Origin of RNA sequence: second (sense) strand base sequence Corresponding positions on NM_000185.4879-900
  source 1..21: mol_type = other RNA
ctggagaatatagaccctgct

SEQ ID NO: 306 - RNA, 21 nt, synthetic construct
  misc_feature 1..21: note = Origin of RNA sequence: second (sense) strand base sequence Corresponding positions on NM_000185.4910-931
  source 1..21: mol_type = other RNA
tgattctcaactgcatctact

SEQ ID NO: 307 - RNA, 21 nt, synthetic construct
  misc_feature 1..21: note = Origin of RNA sequence: second (sense) strand base sequence Corresponding positions on NM_000185.41429-1450
  source 1..21: mol_type = other RNA
tgccgctgtccacccaagtcc

SEQ ID NO: 308 - RNA, 21 nt, synthetic construct
  misc_feature 1..21: note = Origin of RNA sequence: second (sense) strand base sequence Corresponding positions on NM_000185.4915-936
  source 1..21: mol_type = other RNA
ctcaactgcatctacttcaaa

SEQ ID NO: 309 - RNA, 21 nt, synthetic construct
  misc_feature 1..21: note = Origin of RNA sequence: second (sense) strand base sequence Corresponding positions on NM_000185.4976-997
  source 1..21: mol_type = other RNA
accacaacttccggctgaatg

SEQ ID NO: 310 - RNA, 21 nt, synthetic construct
  misc_feature 1..21: note = Origin of RNA sequence: second (sense) strand base sequence Corresponding positions on NM_000185.41417-1438
  source 1..21: mol_type = other RNA
cggtggggttcatgccgctgt

SEQ ID NO: 311 - RNA, 21 nt, synthetic construct
  misc_feature 1..21: note = Origin of RNA sequence: second (sense) strand base sequence Corresponding positions on NM_000185.4985-1006
  source 1..21: mol_type = other RNA
tccggctgaatgagagagagg

SEQ ID NO: 312 - RNA, 21 nt, synthetic construct
  misc_feature 1..21: note = Origin of RNA sequence: second (sense) strand base sequence Corresponding positions on NM_000185.4673-694
  source 1..21: mol_type = other RNA
tcttcaggaggaattttgggt

SEQ ID NO: 313 - RNA, 21 nt, synthetic construct
  misc_feature 1..21: note = Origin of RNA sequence: second (sense) strand base sequence Corresponding positions on NM_000185.4773-794
  source 1..21: mol_type = other RNA
gtattactttgctgaggccca

SEQ ID NO: 314 - RNA, 21 nt, synthetic construct
  misc_feature 1..21: note = Origin of RNA sequence: second (sense) strand base sequence Corresponding positions on NM_000185.4911-932
  source 1..21: mol_type = other RNA
gattctcaactgcatctactt

SEQ ID NO: 315 - RNA, 21 nt, synthetic construct
  misc_feature 1..21: note = Origin of RNA sequence: second (sense) strand base sequence Corresponding positions on NM_000185.41325-1346
  source 1..21: mol_type = other RNA
catctcagaccaaaggatcgc

SEQ ID NO: 316 - RNA, 21 nt, synthetic construct
  misc_feature 1..21: note = Origin of RNA sequence: second (sense) strand base sequence Corresponding positions on NM_000185.41323-1344
  source 1..21: mol_type = other RNA
ggcatctcagaccaaaggatc

SEQ ID NO: 317 - RNA, 21 nt, synthetic construct
  misc_feature 1..21: note = Origin of RNA sequence: second (sense) strand base sequence Corresponding positions on NM_000185.4916-937
  source 1..21: mol_type = other RNA
tcaactgcatctacttcaaag

SEQ ID NO: 318 - RNA, 21 nt, synthetic construct
  misc_feature 1..21: note = Origin of RNA sequence: second (sense) strand base sequence Corresponding positions on NM_000185.41443-1464
  source 1..21: mol_type = other RNA
caagtccgcttcactgtcgac

SEQ ID NO: 319 - RNA, 21 nt, synthetic construct
  misc_feature 1..21: note = Origin of RNA sequence: second (sense) strand base sequence Corresponding positions on NM_000185.41099-1120
  source 1..21: mol_type = other RNA
ggggcatcagcatgctaattg

SEQ ID NO: 320 - RNA, 21 nt, synthetic construct
  misc_feature 1..21: note = Origin of RNA sequence: second (sense) strand base sequence Corresponding positions on NM_000185.4772-793
  source 1..21: mol_type = other RNA
agtattactttgctgaggccc

SEQ ID NO: 321 - RNA, 21 nt, synthetic construct
  misc_feature 1..21: note = Origin of RNA sequence: second (sense) strand base sequence Corresponding positions on NM_000185.41418-1439
  source 1..21: mol_type = other RNA
ggtggggttcatgccgctgtc

SEQ ID NO: 322 - RNA, 21 nt, synthetic construct
  misc_feature 1..21: note = Origin of RNA sequence: second (sense) strand base sequence Corresponding positions on NM_000185.41497-1518
  source 1..21: mol_type = other RNA
accagctgcctgctcttcatg

SEQ ID NO: 323 - RNA, 21 nt, synthetic construct
  misc_feature 1..21: note = Origin of RNA sequence: second (sense) strand base sequence Corresponding positions on NM_000185.4942-963
  source 1..21: mol_type = other RNA
tgggtgaataaattcccagtg

SEQ ID NO: 324 - RNA, 21 nt, synthetic construct
  misc_feature 1..21: note = Origin of RNA sequence: second (sense) strand base sequence Corresponding positions on NM_000185.41192-1213
  source 1..21: mol_type = other RNA
aaaaaagcatgacaaacagaa

SEQ ID NO: 325 - RNA, 21 nt, synthetic construct
  misc_feature 1..21: note = Origin of RNA sequence: second (sense) strand base sequence Corresponding positions on NM_000185.41442-1463
  source 1..21: mol_type = other RNA
ccaagtccgcttcactgtcga

SEQ ID NO: 326 - RNA, 21 nt, synthetic construct
  misc_feature 1..21: note = Origin of RNA sequence: second (sense) strand base sequence Corresponding positions on NM_000185.4405-426
  source 1..21: mol_type = other RNA
aagagccggatccagcgtctt

SEQ ID NO: 327 - RNA, 21 nt, synthetic construct
  misc_feature 1..21: note = Origin of RNA sequence: second (sense) strand base sequence Corresponding positions on NM_000185.41194-1215
  source 1..21: mol_type = other RNA
aaaagcatgacaaacagaact

SEQ ID NO: 328 - RNA, 21 nt, synthetic construct
  misc_feature 1..21: note = Origin of RNA sequence: second (sense) strand base sequence Corresponding positions on NM_000185.41426-1447
  source 1..21: mol_type = other RNA
tcatgccgctgtccacccaag

SEQ ID NO: 329 - RNA, 21 nt, synthetic construct
  misc_feature 1..21: note = Origin of RNA sequence: second (sense) strand base sequence Corresponding positions on NM_000185.41197-1218
  source 1..21: mol_type = other RNA
agcatgacaaacagaactcga

SEQ ID NO: 330 - RNA, 21 nt, synthetic construct
  misc_feature 1..21: note = Origin of RNA sequence: second (sense) strand base sequence Corresponding positions on NM_000185.4970-991
  source 1..21: mol_type = other RNA
cacacaaccacaacttccggc

SEQ ID NO: 331 - RNA, 21 nt, synthetic construct
  misc_feature 1..21: note = Origin of RNA sequence: second (sense) strand base sequence Corresponding positions on NM_000185.4972-993
  source 1..21: mol_type = other RNA
cacaaccacaacttccggctg

SEQ ID NO: 332 - RNA, 21 nt, synthetic construct
  misc_feature 1..21: note = Origin of RNA sequence: second (sense) strand base sequence Corresponding positions on NM_000185.4406-427
  source 1..21: mol_type = other RNA
agagccggatccagcgtctta

SEQ ID NO: 333 - RNA, 21 nt, synthetic construct
  misc_feature 1..21: note = Origin of RNA sequence: second (sense) strand base sequence Corresponding positions on NM_000185.4973-994
  source 1..21: mol_type = other RNA
acaaccacaacttccggctga

SEQ ID NO: 334 - RNA, 21 nt, synthetic construct
  misc_feature 1..21: note = Origin of RNA sequence: second (sense) strand base sequence Corresponding positions on NM_000185.41347-1368
  source 1..21: mol_type = other RNA
atcgacctgttcaagcaccaa

SEQ ID NO: 335 - RNA, 21 nt, synthetic construct
  misc_feature 1..21: note = Origin of RNA sequence: second (sense) strand base sequence Corresponding positions on NM_000185.41175-1196
  source 1..21: mol_type = other RNA
ggtggtggagagatggcaaaa

SEQ ID NO: 336 - RNA, 21 nt, synthetic construct
  misc_feature 1..21: note = Origin of RNA sequence: second (sense) strand base sequence Corresponding positions on NM_000185.41440-1461
  source 1..21: mol_type = other RNA
acccaagtccgcttcactgtc

SEQ ID NO: 337 - RNA, 21 nt, synthetic construct
  misc_feature 1..21: note = Origin of RNA sequence: second (sense) strand base sequence Corresponding positions on NM_000185.41199-1220
  source 1..21: mol_type = other RNA
catgacaaacagaactcgaga

SEQ ID NO: 338 - RNA, 21 nt, synthetic construct
  misc_feature 1..21: note = Origin of RNA sequence: second (sense) strand base sequence Corresponding positions on NM_000185.4409-430
  source 1..21: mol_type = other RNA
gccggatccagcgtcttaaca

SEQ ID NO: 339 - RNA, 21 nt, synthetic construct
  misc_feature 1..21: note = Origin of RNA sequence: second (sense) strand base sequence Corresponding positions on NM_000185.4403-424
  source 1..21: mol_type = other RNA
gcaagagccggatccagcgtc

SEQ ID NO: 340 - RNA, 21 nt, synthetic construct
  misc_feature 1..21: note = Origin of RNA sequence: second (sense) strand base sequence Corresponding positions on NM_000185.4402-423
  source 1..21: mol_type = other RNA
ggcaagagccggatccagcgt

SEQ ID NO: 341 - RNA, 21 nt, synthetic construct
  misc_feature 1..21: note = Origin of RNA sequence: second (sense) strand base sequence Corresponding positions on NM_000185.41420-1441
  source 1..21: mol_type = other RNA
tggggttcatgccgctgtcca

SEQ ID NO: 342 - RNA, 19 nt, synthetic construct
  misc_feature 1..19: note = Origin of RNA sequence: second (sense) strand base sequence Corresponding positions on NM_000185.4950-969
  source 1..19: mol_type = other RNA
aataaattcccagtggaaa

SEQ ID NO: 343 - RNA, 19 nt, synthetic construct
  misc_feature 1..19: note = Origin of RNA sequence: second (sense) strand base sequence Corresponding positions on NM_000185.4924-943
  source 1..19: mol_type = other RNA
gcatctacttcaaaggatc

SEQ ID NO: 344 - RNA, 19 nt, synthetic construct
  misc_feature 1..19: note = Origin of RNA sequence: second (sense) strand base sequence Corresponding positions on NM_000185.4923-942
  source 1..19: mol_type = other RNA
tgcatctacttcaaaggat

SEQ ID NO: 345 - RNA, 19 nt, synthetic construct
  misc_feature 1..19: note = Origin of RNA sequence: second (sense) strand base sequence Corresponding positions on NM_000185.4561-580
  source 1..19: mol_type = other RNA
gagagacccatgaacaagt

SEQ ID NO: 346 - RNA, 19 nt, synthetic construct
  misc_feature 1..19: note = Origin of RNA sequence: second (sense) strand base sequence Corresponding positions on NM_000185.4948-967
  source 1..19: mol_type = other RNA
tgaataaattcccagtgga

SEQ ID NO: 347 - RNA, 19 nt, synthetic construct
  misc_feature 1..19: note = Origin of RNA sequence: second (sense) strand base sequence Corresponding positions on NM_000185.4680-699
  source 1..19: mol_type = other RNA
aggaggaattttgggtaca

SEQ ID NO: 348 - RNA, 19 nt, synthetic construct
  misc_feature 1..19: note = Origin of RNA sequence: second (sense) strand base sequence Corresponding positions on NM_000185.41505-1524
  source 1..19: mol_type = other RNA
tgcctgctcttcatgggaa

SEQ ID NO: 349 - RNA, 19 nt, synthetic construct
  misc_feature 1..19: note = Origin of RNA sequence: second (sense) strand base sequence Corresponding positions on NM_000185.4858-877
  source 1..19: mol_type = other RNA
ccaagggcctcataaaaga

SEQ ID NO: 350 - RNA, 19 nt, synthetic construct
  misc_feature 1..19: note = Origin of RNA sequence: second (sense) strand base sequence Corresponding positions on NM_000185.4720-739
  source 1..19: mol_type = other RNA
tttatatccagaagcagtt

SEQ ID NO: 351 - RNA, 19 nt, synthetic construct
  misc_feature 1..19: note = Origin of RNA sequence: second (sense) strand base sequence Corresponding positions on NM_000185.4921-940
  source 1..19: mol_type = other RNA
actgcatctacttcaaagg

SEQ ID NO: 352 - RNA, 19 nt, synthetic construct
  misc_feature 1..19: note = Origin of RNA sequence: second (sense) strand base sequence Corresponding positions on NM_000185.4411-430
  source 1..19: mol_type = other RNA
gccggatccagcgtcttaa

SEQ ID NO: 353 - RNA, 19 nt, synthetic construct
  misc_feature 1..19: note = Origin of RNA sequence: second (sense) strand base sequence Corresponding positions on NM_000185.4418-437
  source 1..19: mol_type = other RNA
ccagcgtcttaacatcctc

SEQ ID NO: 354 - RNA, 19 nt, synthetic construct
  misc_feature 1..19: note = Origin of RNA sequence: second (sense) strand base sequence Corresponding positions on NM_000185.41195-1214
  source 1..19: mol_type = other RNA
aaaaagcatgacaaacaga

SEQ ID NO: 355 - RNA, 19 nt, synthetic construct
  misc_feature 1..19: note = Origin of RNA sequence: second (sense) strand base sequence Corresponding positions on NM_000185.4681-700
  source 1..19: mol_type = other RNA
ggaggaattttgggtacac

SEQ ID NO: 356 - RNA, 19 nt, synthetic construct
  misc_feature 1..19: note = Origin of RNA sequence: second (sense) strand base sequence Corresponding positions on NM_000185.4978-997
  source 1..19: mol_type = other RNA
accacaacttccggctgaa

SEQ ID NO: 357 - RNA, 19 nt, synthetic construct
  misc_feature 1..19: note = Origin of RNA sequence: second (sense) strand base sequence Corresponding positions on NM_000185.41193-1212
  source 1..19: mol_type = other RNA
caaaaaagcatgacaaaca

SEQ ID NO: 358 - RNA, 19 nt, synthetic construct
  misc_feature 1..19: note = Origin of RNA sequence: second (sense) strand base sequence Corresponding positions on NM_000185.4951-970
  source 1..19: mol_type = other RNA
ataaattcccagtggaaat

SEQ ID NO: 359 - RNA, 19 nt, synthetic construct
  misc_feature 1..19: note = Origin of RNA sequence: second (sense) strand base sequence Corresponding positions on NM_000185.41104-1123
  source 1..19: mol_type = other RNA
gcatcagcatgctaattgt

SEQ ID NO: 360 - RNA, 19 nt, synthetic construct
  misc_feature 1..19: note = Origin of RNA sequence: second (sense) strand base sequence Corresponding positions on NM_000185.41197-1216
  source 1..19: mol_type = other RNA
aaagcatgacaaacagaac

SEQ ID NO: 361 - RNA, 19 nt, synthetic construct
  misc_feature 1..19: note = Origin of RNA sequence: second (sense) strand base sequence Corresponding positions on NM_000185.4775-794
  source 1..19: mol_type = other RNA
gtattactttgctgaggcc

SEQ ID NO: 362 - RNA, 23 nt, synthetic construct
  misc_feature 1..23: note = siRNA sequence name:ETXS232
  modified_base 1: mod_base = OTHER; note = 2'O-methyl-uridine
  modified_base 2: mod_base = OTHER; note = 2' Fluoro-uridine
  modified_base 3: mod_base = OTHER; note = 2'O-methyl-uridine
  modified_base 4: mod_base = OTHER; note = 2'O-methyl-cytidine
  modified_base 5: mod_base = OTHER; note = 2'O-methyl-cytidine
  modified_base 6: mod_base = OTHER; note = 2'Fluoro-adenosine
  modified_base 7: mod_base = OTHER; note = 2'O-methyl-cytidine
  modified_base 8: mod_base = OTHER; note = 2' Fluoro-uridine
  modified_base 9: mod_base = OTHER; note = 2' Fluoro-guanosine
  modified_base 10: mod_base = OTHER; note = 2'O-methyl-guanosine
  modified_base 11: mod_base = OTHER; note = 2'O-methyl-guanosine
  modified_base 12: mod_base = OTHER; note = 2'O-methyl-adenosine
  modified_base 13: mod_base = OTHER; note = 2'O-methyl-adenosine
  modified_base 14: mod_base = OTHER; note = 2' Fluoro-uridine
  modified_base 15: mod_base = OTHER; note = 2'O-methyl-uridine
  modified_base 16: mod_base = OTHER; note = 2' Fluoro-uridine
  modified_base 17: mod_base = OTHER; note = 2'O-methyl-adenosine
  modified_base 18: mod_base = OTHER; note = 2'O-methyl-uridine
  modified_base 19: mod_base = OTHER; note = 2'O-methyl-uridine
  modified_base 20: mod_base = OTHER; note = 2'O-methyl-cytidine
  modified_base 21: mod_base = OTHER; note = 2'O-methyl-adenosine
  modified_base 22: mod_base = OTHER; note = 2'O-methyl-cytidine
  modified_base 23: mod_base = OTHER; note = 2'O-methyl-cytidine
  modified_base 1..2: mod_base = OTHER; note = phosphorothioate linkage
  modified_base 2..3: mod_base = OTHER; note = phosphorothioate linkage
  modified_base 21..22: mod_base = OTHER; note = phosphorothioate linkage
  modified_base 22..23: mod_base = OTHER; note = phosphorothioate linkage
  source 1..23: mol_type = other RNA
tttccactgggaatttattcacc

SEQ ID NO: 363 - RNA, 23 nt, synthetic construct
  misc_feature 1..23: note = siRNA sequence name:ETXS234
  modified_base 1: mod_base = OTHER; note = 2'O-methyl-guanosine
  modified_base 2: mod_base = OTHER; note = 2'Fluoro-adenosine
  modified_base 3: mod_base = OTHER; note = 2'O-methyl-uridine
  modified_base 4: mod_base = OTHER; note = 2'O-methyl-cytidine
  modified_base 5: mod_base = OTHER; note = 2'O-methyl-cytidine
  modified_base 6: mod_base = OTHER; note = 2' Fluoro-uridine
  modified_base 7: mod_base = OTHER; note = 2'O-methyl-uridine
  modified_base 8: mod_base = OTHER; note = 2' Fluoro-uridine
  modified_base 9: mod_base = OTHER; note = 2' Fluoro-guanosine
  modified_base 10: mod_base = OTHER; note = 2'O-methyl-adenosine
  modified_base 11: mod_base = OTHER; note = 2'O-methyl-adenosine
  modified_base 12: mod_base = OTHER; note = 2'O-methyl-guanosine
  modified_base 13: mod_base = OTHER; note = 2'O-methyl-uridine
  modified_base 14: mod_base = OTHER; note = 2'Fluoro-adenosine
  modified_base 15: mod_base = OTHER; note = 2'O-methyl-guanosine
  modified_base 16: mod_base = OTHER; note = 2'Fluoro-adenosine
  modified_base 17: mod_base = OTHER; note = 2'O-methyl-uridine
  modified_base 18: mod_base = OTHER; note = 2'O-methyl-guanosine
  modified_base 19: mod_base = OTHER; note = 2'O-methyl-cytidine
  modified_base 20: mod_base = OTHER; note = 2'O-methyl-adenosine
  modified_base 21: mod_base = OTHER; note = 2'O-methyl-guanosine
  modified_base 22: mod_base = OTHER; note = 2'O-methyl-uridine
  modified_base 23: mod_base = OTHER; note = 2'O-methyl-uridine
  modified_base 1..2: mod_base = OTHER; note = phosphorothioate linkage
  modified_base 2..3: mod_base = OTHER; note = phosphorothioate linkage
  modified_base 21..22: mod_base = OTHER; note = phosphorothioate linkage
  modified_base 22..23: mod_base = OTHER; note = phosphorothioate linkage
  source 1..23: mol_type = other RNA
gatcctttgaagtagatgcagtt

SEQ ID NO: 364 - RNA, 23 nt, synthetic construct
  misc_feature 1..23: note = siRNA sequence name:ETXS236
  modified_base 1: mod_base = OTHER; note = 2'O-methyl-adenosine
  modified_base 2: mod_base = OTHER; note = 2' Fluoro-uridine
  modified_base 3: mod_base = OTHER; note = 2'O-methyl-cytidine
  modified_base 4: mod_base = OTHER; note = 2'O-methyl-cytidine
  modified_base 5: mod_base = OTHER; note = 2'O-methyl-uridine
  modified_base 6: mod_base = OTHER; note = 2' Fluoro-uridine
  modified_base 7: mod_base = OTHER; note = 2'O-methyl-uridine
  modified_base 8: mod_base = OTHER; note = 2' Fluoro-guanosine
  modified_base 9: mod_base = OTHER; note = 2'Fluoro-adenosine
  modified_base 10: mod_base = OTHER; note = 2'O-methyl-adenosine
  modified_base 11: mod_base = OTHER; note = 2'O-methyl-guanosine
  modified_base 12: mod_base = OTHER; note = 2'O-methyl-uridine
  modified_base 13: mod_base = OTHER; note = 2'O-methyl-adenosine
  modified_base 14: mod_base = OTHER; note = 2' Fluoro-guanosine
  modified_base 15: mod_base = OTHER; note = 2'O-methyl-adenosine
  modified_base 16: mod_base = OTHER; note = 2' Fluoro-uridine
  modified_base 17: mod_base = OTHER; note = 2'O-methyl-guanosine
  modified_base 18: mod_base = OTHER; note = 2'O-methyl-cytidine
  modified_base 19: mod_base = OTHER; note = 2'O-methyl-adenosine
  modified_base 20: mod_base = OTHER; note = 2'O-methyl-guanosine
  modified_base 21: mod_base = OTHER; note = 2'O-methyl-uridine
  modified_base 22: mod_base = OTHER; note = 2'O-methyl-uridine
  modified_base 23: mod_base = OTHER; note = 2'O-methyl-guanosine
  modified_base 1..2: mod_base = OTHER; note = phosphorothioate linkage
  modified_base 2..3: mod_base = OTHER; note = phosphorothioate linkage
  modified_base 21..22: mod_base = OTHER; note = phosphorothioate linkage
  modified_base 22..23: mod_base = OTHER; note = phosphorothioate linkage
  source 1..23: mol_type = other RNA
atcctttgaagtagatgcagttg

SEQ ID NO: 365 - RNA, 23 nt, synthetic construct
  misc_feature 1..23: note = siRNA sequence name:ETXS238
  modified_base 1: mod_base = OTHER; note = 2'O-methyl-adenosine
  modified_base 2: mod_base = OTHER; note = 2' Fluoro-cytidine
  modified_base 3: mod_base = OTHER; note = 2'O-methyl-uridine
  modified_base 4: mod_base = OTHER; note = 2'O-methyl-uridine
  modified_base 5: mod_base = OTHER; note = 2'O-methyl-guanosine
  modified_base 6: mod_base = OTHER; note = 2' Fluoro-uridine
  modified_base 7: mod_base = OTHER; note = 2'O-methyl-uridine
  modified_base 8: mod_base = OTHER; note = 2' Fluoro-cytidine
  modified_base 9: mod_base = OTHER; note = 2'Fluoro-adenosine
  modified_base 10: mod_base = OTHER; note = 2'O-methyl-uridine
  modified_base 11: mod_base = OTHER; note = 2'O-methyl-guanosine
  modified_base 12: mod_base = OTHER; note = 2'O-methyl-guanosine
  modified_base 13: mod_base = OTHER; note = 2'O-methyl-guanosine
  modified_base 14: mod_base = OTHER; note = 2' Fluoro-uridine
  modified_base 15: mod_base = OTHER; note = 2'O-methyl-cytidine
  modified_base 16: mod_base = OTHER; note = 2' Fluoro-uridine
  modified_base 17: mod_base = OTHER; note = 2'O-methyl-cytidine
  modified_base 18: mod_base = OTHER; note = 2'O-methyl-uridine
  modified_base 19: mod_base = OTHER; note = 2'O-methyl-cytidine
  modified_base 20: mod_base = OTHER; note = 2'O-methyl-cytidine
  modified_base 21: mod_base = OTHER; note = 2'O-methyl-cytidine
  modified_base 22: mod_base = OTHER; note = 2'O-methyl-uridine
  modified_base 23: mod_base = OTHER; note = 2'O-methyl-uridine
  modified_base 1..2: mod_base = OTHER; note = phosphorothioate linkage
  modified_base 2..3: mod_base = OTHER; note = phosphorothioate linkage
  modified_base 21..22: mod_base = OTHER; note = phosphorothioate linkage
  modified_base 22..23: mod_base = OTHER; note = phosphorothioate linkage
  source 1..23: mol_type = other RNA
acttgttcatgggtctctccctt

SEQ ID NO: 366 - RNA, 23 nt, synthetic construct
  misc_feature 1..23: note = siRNA sequence name:ETXS240
  modified_base 1: mod_base = OTHER; note = 2'O-methyl-uridine
  modified_base 2: mod_base = OTHER; note = 2' Fluoro-cytidine
  modified_base 3: mod_base = OTHER; note = 2'O-methyl-cytidine
  modified_base 4: mod_base = OTHER; note = 2'O-methyl-adenosine
  modified_base 5: mod_base = OTHER; note = 2'O-methyl-cytidine
  modified_base 6: mod_base = OTHER; note = 2' Fluoro-uridine
  modified_base 7: mod_base = OTHER; note = 2'O-methyl-guanosine
  modified_base 8: mod_base = OTHER; note = 2' Fluoro-guanosine
  modified_base 9: mod_base = OTHER; note = 2' Fluoro-guanosine
  modified_base 10: mod_base = OTHER; note = 2'O-methyl-adenosine
  modified_base 11: mod_base = OTHER; note = 2'O-methyl-adenosine
  modified_base 12: mod_base = OTHER; note = 2'O-methyl-uridine
  modified_base 13: mod_base = OTHER; note = 2'O-methyl-uridine
  modified_base 14: mod_base = OTHER; note = 2' Fluoro-uridine
  modified_base 15: mod_base = OTHER; note = 2'O-methyl-adenosine
  modified_base 16: mod_base = OTHER; note = 2' Fluoro-uridine
  modified_base 17: mod_base = OTHER; note = 2'O-methyl-uridine
  modified_base 18: mod_base = OTHER; note = 2'O-methyl-cytidine
  modified_base 19: mod_base = OTHER; note = 2'O-methyl-adenosine
  modified_base 20: mod_base = OTHER; note = 2'O-methyl-cytidine
  modified_base 21: mod_base = OTHER; note = 2'O-methyl-cytidine
  modified_base 22: mod_base = OTHER; note = 2'O-methyl-cytidine
  modified_base 23: mod_base = OTHER; note = 2'O-methyl-adenosine
  modified_base 1..2: mod_base = OTHER; note = phosphorothioate linkage
  modified_base 2..3: mod_base = OTHER; note = phosphorothioate linkage
  modified_base 21..22: mod_base = OTHER; note = phosphorothioate linkage
  modified_base 22..23: mod_base = OTHER; note = phosphorothioate linkage
  source 1..23: mol_type = other RNA
tccactgggaatttattcaccca

SEQ ID NO: 367 - RNA, 23 nt, synthetic construct
  misc_feature 1..23: note = siRNA sequence name:ETXS242
  modified_base 1: mod_base = OTHER; note = 2'O-methyl-uridine
  modified_base 2: mod_base = OTHER; note = 2' Fluoro-guanosine
  modified_base 3: mod_base = OTHER; note = 2'O-methyl-uridine
  modified_base 4: mod_base = OTHER; note = 2'O-methyl-adenosine
  modified_base 5: mod_base = OTHER; note = 2'O-methyl-cytidine
  modified_base 6: mod_base = OTHER; note = 2' Fluoro-cytidine
  modified_base 7: mod_base = OTHER; note = 2'O-methyl-cytidine
  modified_base 8: mod_base = OTHER; note = 2'Fluoro-adenosine
  modified_base 9: mod_base = OTHER; note = 2'Fluoro-adenosine
  modified_base 10: mod_base = OTHER; note = 2'O-methyl-adenosine
  modified_base 11: mod_base = OTHER; note = 2'O-methyl-adenosine
  modified_base 12: mod_base = OTHER; note = 2'O-methyl-uridine
  modified_base 13: mod_base = OTHER; note = 2'O-methyl-uridine
  modified_base 14: mod_base = OTHER; note = 2' Fluoro-cytidine
  modified_base 15: mod_base = OTHER; note = 2'O-methyl-cytidine
  modified_base 16: mod_base = OTHER; note = 2' Fluoro-uridine
  modified_base 17: mod_base = OTHER; note = 2'O-methyl-cytidine
  modified_base 18: mod_base = OTHER; note = 2'O-methyl-cytidine
  modified_base 19: mod_base = OTHER; note = 2'O-methyl-uridine
  modified_base 20: mod_base = OTHER; note = 2'O-methyl-guanosine
  modified_base 21: mod_base = OTHER; note = 2'O-methyl-adenosine
  modified_base 22: mod_base = OTHER; note = 2'O-methyl-adenosine
  modified_base 23: mod_base = OTHER; note = 2'O-methyl-guanosine
  modified_base 1..2: mod_base = OTHER; note = phosphorothioate linkage
  modified_base 2..3: mod_base = OTHER; note = phosphorothioate linkage
  modified_base 21..22: mod_base = OTHER; note = phosphorothioate linkage
  modified_base 22..23: mod_base = OTHER; note = phosphorothioate linkage
  source 1..23: mol_type = other RNA
tgtacccaaaattcctcctgaag

SEQ ID NO: 368 - RNA, 23 nt, synthetic construct
  misc_feature 1..23: note = siRNA sequence name:ETXS244
  modified_base 1: mod_base = OTHER; note = 2'O-methyl-uridine
  modified_base 2: mod_base = OTHER; note = 2' Fluoro-uridine
  modified_base 3: mod_base = OTHER; note = 2'O-methyl-cytidine
  modified_base 4: mod_base = OTHER; note = 2'O-methyl-cytidine
  modified_base 5: mod_base = OTHER; note = 2'O-methyl-cytidine
  modified_base 6: mod_base = OTHER; note = 2'Fluoro-adenosine
  modified_base 7: mod_base = OTHER; note = 2'O-methyl-uridine
  modified_base 8: mod_base = OTHER; note = 2' Fluoro-guanosine
  modified_base 9: mod_base = OTHER; note = 2'Fluoro-adenosine
  modified_base 10: mod_base = OTHER; note = 2'O-methyl-adenosine
  modified_base 11: mod_base = OTHER; note = 2'O-methyl-guanosine
  modified_base 12: mod_base = OTHER; note = 2'O-methyl-adenosine
  modified_base 13: mod_base = OTHER; note = 2'O-methyl-guanosine
  modified_base 14: mod_base = OTHER; note = 2' Fluoro-cytidine
  modified_base 15: mod_base = OTHER; note = 2'O-methyl-adenosine
  modified_base 16: mod_base = OTHER; note = 2' Fluoro-guanosine
  modified_base 17: mod_base = OTHER; note = 2'O-methyl-guanosine
  modified_base 18: mod_base = OTHER; note = 2'O-methyl-cytidine
  modified_base 19: mod_base = OTHER; note = 2'O-methyl-adenosine
  modified_base 20: mod_base = OTHER; note = 2'O-methyl-guanosine
  modified_base 21: mod_base = OTHER; note = 2'O-methyl-cytidine
  modified_base 22: mod_base = OTHER; note = 2'O-methyl-uridine
  modified_base 23: mod_base = OTHER; note = 2'O-methyl-guanosine
  modified_base 1..2: mod_base = OTHER; note = phosphorothioate linkage
  modified_base 2..3: mod_base = OTHER; note = phosphorothioate linkage
  modified_base 21..22: mod_base = OTHER; note = phosphorothioate linkage
  modified_base 22..23: mod_base = OTHER; note = phosphorothioate linkage
  source 1..23: mol_type = other RNA
ttcccatgaagagcaggcagctg

SEQ ID NO: 369 - RNA, 23 nt, synthetic construct
  misc_feature 1..23: note = siRNA sequence name:ETXS246
  modified_base 1: mod_base = OTHER; note = 2'O-methyl-uridine
  modified_base 2: mod_base = OTHER; note = 2' Fluoro-cytidine
  modified_base 3: mod_base = OTHER; note = 2'O-methyl-uridine
  modified_base 4: mod_base = OTHER; note = 2'O-methyl-uridine
  modified_base 5: mod_base = OTHER; note = 2'O-methyl-uridine
  modified_base 6: mod_base = OTHER; note = 2' Fluoro-uridine
  modified_base 7: mod_base = OTHER; note = 2'O-methyl-adenosine
  modified_base 8: mod_base = OTHER; note = 2' Fluoro-uridine
  modified_base 9: mod_base = OTHER; note = 2' Fluoro-guanosine
  modified_base 10: mod_base = OTHER; note = 2'O-methyl-adenosine
  modified_base 11: mod_base = OTHER; note = 2'O-methyl-guanosine
  modified_base 12: mod_base = OTHER; note = 2'O-methyl-guanosine
  modified_base 13: mod_base = OTHER; note = 2'O-methyl-cytidine
  modified_base 14: mod_base = OTHER; note = 2' Fluoro-cytidine
  modified_base 15: mod_base = OTHER; note = 2'O-methyl-cytidine
  modified_base 16: mod_base = OTHER; note = 2' Fluoro-uridine
  modified_base 17: mod_base = OTHER; note = 2'O-methyl-uridine
  modified_base 18: mod_base = OTHER; note = 2'O-methyl-guanosine
  modified_base 19: mod_base = OTHER; note = 2'O-methyl-guanosine
  modified_base 20: mod_base = OTHER; note = 2'O-methyl-uridine
  modified_base 21: mod_base = OTHER; note = 2'O-methyl-guanosine
  modified_base 22: mod_base = OTHER; note = 2'O-methyl-adenosine
  modified_base 23: mod_base = OTHER; note = 2'O-methyl-guanosine
  modified_base 1..2: mod_base = OTHER; note = phosphorothioate linkage
  modified_base 2..3: mod_base = OTHER; note = phosphorothioate linkage
  modified_base 21..22: mod_base = OTHER; note = phosphorothioate linkage
  modified_base 22..23: mod_base = OTHER; note = phosphorothioate linkage
  source 1..23: mol_type = other RNA
tcttttatgaggcccttggtgag

SEQ ID NO: 370 - RNA, 23 nt, synthetic construct
  misc_feature 1..23: note = siRNA sequence name:ETXS248
  modified_base 1: mod_base = OTHER; note = 2'O-methyl-adenosine
  modified_base 2: mod_base = OTHER; note = 2'Fluoro-adenosine
  modified_base 3: mod_base = OTHER; note = 2'O-methyl-cytidine
  modified_base 4: mod_base = OTHER; note = 2'O-methyl-uridine
  modified_base 5: mod_base = OTHER; note = 2'O-methyl-guanosine
  modified_base 6: mod_base = OTHER; note = 2' Fluoro-cytidine
  modified_base 7: mod_base = OTHER; note = 2'O-methyl-uridine
  modified_base 8: mod_base = OTHER; note = 2' Fluoro-uridine
  modified_base 9: mod_base = OTHER; note = 2' Fluoro-cytidine
  modified_base 10: mod_base = OTHER; note = 2'O-methyl-uridine
  modified_base 11: mod_base = OTHER; note = 2'O-methyl-guanosine
  modified_base 12: mod_base = OTHER; note = 2'O-methyl-guanosine
  modified_base 13: mod_base = OTHER; note = 2'O-methyl-adenosine
  modified_base 14: mod_base = OTHER; note = 2' Fluoro-uridine
  modified_base 15: mod_base = OTHER; note = 2'O-methyl-adenosine
  modified_base 16: mod_base = OTHER; note = 2' Fluoro-uridine
  modified_base 17: mod_base = OTHER; note = 2'O-methyl-adenosine
  modified_base 18: mod_base = OTHER; note = 2'O-methyl-adenosine
  modified_base 19: mod_base = OTHER; note = 2'O-methyl-adenosine
  modified_base 20: mod_base = OTHER; note = 2'O-methyl-guanosine
  modified_base 21: mod_base = OTHER; note = 2'O-methyl-guanosine
  modified_base 22: mod_base = OTHER; note = 2'O-methyl-uridine
  modified_base 23: mod_base = OTHER; note = 2'O-methyl-cytidine
  modified_base 1..2: mod_base = OTHER; note = phosphorothioate linkage
  modified_base 2..3: mod_base = OTHER; note = phosphorothioate linkage
  modified_base 21..22: mod_base = OTHER; note = phosphorothioate linkage
  modified_base 22..23: mod_base = OTHER; note = phosphorothioate linkage
  source 1..23: mol_type = other RNA
aactgcttctggatataaaggtc

SEQ ID NO: 371 - RNA, 23 nt, synthetic construct
  misc_feature 1..23: note = siRNA sequence name:ETXS250
  modified_base 1: mod_base = OTHER; note = 2'O-methyl-cytidine
  modified_base 2: mod_base = OTHER; note = 2' Fluoro-cytidine
  modified_base 3: mod_base = OTHER; note = 2'O-methyl-uridine
  modified_base 4: mod_base = OTHER; note = 2'O-methyl-uridine
  modified_base 5: mod_base = OTHER; note = 2'O-methyl-uridine
  modified_base 6: mod_base = OTHER; note = 2' Fluoro-guanosine
  modified_base 7: mod_base = OTHER; note = 2'O-methyl-adenosine
  modified_base 8: mod_base = OTHER; note = 2'Fluoro-adenosine
  modified_base 9: mod_base = OTHER; note = 2' Fluoro-guanosine
  modified_base 10: mod_base = OTHER; note = 2'O-methyl-uridine
  modified_base 11: mod_base = OTHER; note = 2'O-methyl-adenosine
  modified_base 12: mod_base = OTHER; note = 2'O-methyl-guanosine
  modified_base 13: mod_base = OTHER; note = 2'O-methyl-adenosine
  modified_base 14: mod_base = OTHER; note = 2' Fluoro-uridine
  modified_base 15: mod_base = OTHER; note = 2'O-methyl-guanosine
  modified_base 16: mod_base = OTHER; note = 2' Fluoro-cytidine
  modified_base 17: mod_base = OTHER; note = 2'O-methyl-adenosine
  modified_base 18: mod_base = OTHER; note = 2'O-methyl-guanosine
  modified_base 19: mod_base = OTHER; note = 2'O-methyl-uridine
  modified_base 20: mod_base = OTHER; note = 2'O-methyl-uridine
  modified_base 21: mod_base = OTHER; note = 2'O-methyl-guanosine
  modified_base 22: mod_base = OTHER; note = 2'O-methyl-adenosine
  modified_base 23: mod_base = OTHER; note = 2'O-methyl-guanosine
  modified_base 1..2: mod_base = OTHER; note = phosphorothioate linkage
  modified_base 2..3: mod_base = OTHER; note = phosphorothioate linkage
  modified_base 21..22: mod_base = OTHER; note = phosphorothioate linkage
  modified_base 22..23: mod_base = OTHER; note = phosphorothioate linkage
  source 1..23: mol_type = other RNA
cctttgaagtagatgcagttgag

SEQ ID NO: 372 - RNA, 23 nt, synthetic construct
  misc_feature 1..23: note = siRNA sequence name:ETXS252
  modified_base 1: mod_base = OTHER; note = 2'O-methyl-uridine
  modified_base 2: mod_base = OTHER; note = 2' Fluoro-uridine
  modified_base 3: mod_base = OTHER; note = 2'O-methyl-adenosine
  modified_base 4: mod_base = OTHER; note = 2'O-methyl-adenosine
  modified_base 5: mod_base = OTHER; note = 2'O-methyl-guanosine
  modified_base 6: mod_base = OTHER; note = 2'Fluoro-adenosine
  modified_base 7: mod_base = OTHER; note = 2'O-methyl-cytidine
  modified_base 8: mod_base = OTHER; note = 2' Fluoro-guanosine
  modified_base 9: mod_base = OTHER; note = 2' Fluoro-cytidine
  modified_base 10: mod_base = OTHER; note = 2'O-methyl-uridine
  modified_base 11: mod_base = OTHER; note = 2'O-methyl-guanosine
  modified_base 12: mod_base = OTHER; note = 2'O-methyl-guanosine
  modified_base 13: mod_base = OTHER; note = 2'O-methyl-adenosine
  modified_base 14: mod_base = OTHER; note = 2' Fluoro-uridine
  modified_base 15: mod_base = OTHER; note = 2'O-methyl-cytidine
  modified_base 16: mod_base = OTHER; note = 2' Fluoro-cytidine
  modified_base 17: mod_base = OTHER; note = 2'O-methyl-guanosine
  modified_base 18: mod_base = OTHER; note = 2'O-methyl-guanosine
  modified_base 19: mod_base = OTHER; note = 2'O-methyl-cytidine
  modified_base 20: mod_base = OTHER; note = 2'O-methyl-uridine
  modified_base 21: mod_base = OTHER; note = 2'O-methyl-cytidine
  modified_base 22: mod_base = OTHER; note = 2'O-methyl-uridine
  modified_base 23: mod_base = OTHER; note = 2'O-methyl-uridine
  modified_base 1..2: mod_base = OTHER; note = phosphorothioate linkage
  modified_base 2..3: mod_base = OTHER; note = phosphorothioate linkage
  modified_base 21..22: mod_base = OTHER; note = phosphorothioate linkage
  modified_base 22..23: mod_base = OTHER; note = phosphorothioate linkage
  source 1..23: mol_type = other RNA
ttaagacgctggatccggctctt

SEQ ID NO: 373 - RNA, 23 nt, synthetic construct
  misc_feature 1..23: note = siRNA sequence name:ETXS254
  modified_base 1: mod_base = OTHER; note = 2'O-methyl-guanosine
  modified_base 2: mod_base = OTHER; note = 2'Fluoro-adenosine
  modified_base 3: mod_base = OTHER; note = 2'O-methyl-guanosine
  modified_base 4: mod_base = OTHER; note = 2'O-methyl-guanosine
  modified_base 5: mod_base = OTHER; note = 2'O-methyl-adenosine
  modified_base 6: mod_base = OTHER; note = 2' Fluoro-uridine
  modified_base 7: mod_base = OTHER; note = 2'O-methyl-guanosine
  modified_base 8: mod_base = OTHER; note = 2' Fluoro-uridine
  modified_base 9: mod_base = OTHER; note = 2' Fluoro-uridine
  modified_base 10: mod_base = OTHER; note = 2'O-methyl-adenosine
  modified_base 11: mod_base = OTHER; note = 2'O-methyl-adenosine
  modified_base 12: mod_base = OTHER; note = 2'O-methyl-guanosine
  modified_base 13: mod_base = OTHER; note = 2'O-methyl-adenosine
  modified_base 14: mod_base = OTHER; note = 2' Fluoro-cytidine
  modified_base 15: mod_base = OTHER; note = 2'O-methyl-guanosine
  modified_base 16: mod_base = OTHER; note = 2' Fluoro-cytidine
  modified_base 17: mod_base = OTHER; note = 2'O-methyl-uridine
  modified_base 18: mod_base = OTHER; note = 2'O-methyl-guanosine
  modified_base 19: mod_base = OTHER; note = 2'O-methyl-guanosine
  modified_base 20: mod_base = OTHER; note = 2'O-methyl-adenosine
  modified_base 21: mod_base = OTHER; note = 2'O-methyl-uridine
  modified_base 22: mod_base = OTHER; note = 2'O-methyl-cytidine
  modified_base 23: mod_base = OTHER; note = 2'O-methyl-cytidine
  modified_base 1..2: mod_base = OTHER; note = phosphorothioate linkage
  modified_base 2..3: mod_base = OTHER; note = phosphorothioate linkage
  modified_base 21..22: mod_base = OTHER; note = phosphorothioate linkage
  modified_base 22..23: mod_base = OTHER; note = phosphorothioate linkage
  source 1..23: mol_type = other RNA
gaggatgttaagacgctggatcc

SEQ ID NO: 374 - RNA, 23 nt, synthetic construct
  misc_feature 1..23: note = siRNA sequence name:ETXS256
  modified_base 1: mod_base = OTHER; note = 2'O-methyl-uridine
  modified_base 2: mod_base = OTHER; note = 2' Fluoro-cytidine
  modified_base 3: mod_base = OTHER; note = 2'O-methyl-uridine
  modified_base 4: mod_base = OTHER; note = 2'O-methyl-guanosine
  modified_base 5: mod_base = OTHER; note = 2'O-methyl-uridine
  modified_base 6: mod_base = OTHER; note = 2' Fluoro-uridine
  modified_base 7: mod_base = OTHER; note = 2'O-methyl-uridine
  modified_base 8: mod_base = OTHER; note = 2' Fluoro-guanosine
  modified_base 9: mod_base = OTHER; note = 2' Fluoro-uridine
  modified_base 10: mod_base = OTHER; note = 2'O-methyl-cytidine
  modified_base 11: mod_base = OTHER; note = 2'O-methyl-adenosine
  modified_base 12: mod_base = OTHER; note = 2'O-methyl-uridine
  modified_base 13: mod_base = OTHER; note = 2'O-methyl-guanosine
  modified_base 14: mod_base = OTHER; note = 2' Fluoro-cytidine
  modified_base 15: mod_base = OTHER; note = 2'O-methyl-uridine
  modified_base 16: mod_base = OTHER; note = 2' Fluoro-uridine
  modified_base 17: mod_base = OTHER; note = 2'O-methyl-uridine
  modified_base 18: mod_base = OTHER; note = 2'O-methyl-uridine
  modified_base 19: mod_base = OTHER; note = 2'O-methyl-uridine
  modified_base 20: mod_base = OTHER; note = 2'O-methyl-uridine
  modified_base 21: mod_base = OTHER; note = 2'O-methyl-guanosine
  modified_base 22: mod_base = OTHER; note = 2'O-methyl-cytidine
  modified_base 23: mod_base = OTHER; note = 2'O-methyl-cytidine
  modified_base 1..2: mod_base = OTHER; note = phosphorothioate linkage
  modified_base 2..3: mod_base = OTHER; note = phosphorothioate linkage
  modified_base 21..22: mod_base = OTHER; note = phosphorothioate linkage
  modified_base 22..23: mod_base = OTHER; note = phosphorothioate linkage
  source 1..23: mol_type = other RNA
tctgtttgtcatgcttttttgcc

SEQ ID NO: 375 - RNA, 23 nt, synthetic construct
  misc_feature 1..23: note = siRNA sequence name:ETXS258
  modified_base 1: mod_base = OTHER; note = 2'O-methyl-guanosine
  modified_base 2: mod_base = OTHER; note = 2' Fluoro-uridine
  modified_base 3: mod_base = OTHER; note = 2'O-methyl-guanosine
  modified_base 4: mod_base = OTHER; note = 2'O-methyl-uridine
  modified_base 5: mod_base = OTHER; note = 2'O-methyl-adenosine
  modified_base 6: mod_base = OTHER; note = 2' Fluoro-cytidine
  modified_base 7: mod_base = OTHER; note = 2'O-methyl-cytidine
  modified_base 8: mod_base = OTHER; note = 2' Fluoro-cytidine
  modified_base 9: mod_base = OTHER; note = 2'Fluoro-adenosine
  modified_base 10: mod_base = OTHER; note = 2'O-methyl-adenosine
  modified_base 11: mod_base = OTHER; note = 2'O-methyl-adenosine
  modified_base 12: mod_base = OTHER; note = 2'O-methyl-adenosine
  modified_base 13: mod_base = OTHER; note = 2'O-methyl-uridine
  modified_base 14: mod_base = OTHER; note = 2' Fluoro-uridine
  modified_base 15: mod_base = OTHER; note = 2'O-methyl-cytidine
  modified_base 16: mod_base = OTHER; note = 2' Fluoro-cytidine
  modified_base 17: mod_base = OTHER; note = 2'O-methyl-uridine
  modified_base 18: mod_base = OTHER; note = 2'O-methyl-cytidine
  modified_base 19: mod_base = OTHER; note = 2'O-methyl-cytidine
  modified_base 20: mod_base = OTHER; note = 2'O-methyl-uridine
  modified_base 21: mod_base = OTHER; note = 2'O-methyl-guanosine
  modified_base 22: mod_base = OTHER; note = 2'O-methyl-adenosine
  modified_base 23: mod_base = OTHER; note = 2'O-methyl-adenosine
  modified_base 1..2: mod_base = OTHER; note = phosphorothioate linkage
  modified_base 2..3: mod_base = OTHER; note = phosphorothioate linkage
  modified_base 21..22: mod_base = OTHER; note = phosphorothioate linkage
  modified_base 22..23: mod_base = OTHER; note = phosphorothioate linkage
  source 1..23: mol_type = other RNA
gtgtacccaaaattcctcctgaa

SEQ ID NO: 376 - RNA, 23 nt, synthetic construct
  misc_feature 1..23: note = siRNA sequence name:ETXS260
  modified_base 1: mod_base = OTHER; note = 2'O-methyl-uridine
  modified_base 2: mod_base = OTHER; note = 2' Fluoro-uridine
  modified_base 3: mod_base = OTHER; note = 2'O-methyl-cytidine
  modified_base 4: mod_base = OTHER; note = 2'O-methyl-adenosine
  modified_base 5: mod_base = OTHER; note = 2'O-methyl-guanosine
  modified_base 6: mod_base = OTHER; note = 2' Fluoro-cytidine
  modified_base 7: mod_base = OTHER; note = 2'O-methyl-cytidine
  modified_base 8: mod_base = OTHER; note = 2' Fluoro-guanosine
  modified_base 9: mod_base = OTHER; note = 2' Fluoro-guanosine
  modified_base 10: mod_base = OTHER; note = 2'O-methyl-adenosine
  modified_base 11: mod_base = OTHER; note = 2'O-methyl-adenosine
  modified_base 12: mod_base = OTHER; note = 2'O-methyl-guanosine
  modified_base 13: mod_base = OTHER; note = 2'O-methyl-uridine
  modified_base 14: mod_base = OTHER; note = 2' Fluoro-uridine
  modified_base 15: mod_base = OTHER; note = 2'O-methyl-guanosine
  modified_base 16: mod_base = OTHER; note = 2' Fluoro-uridine
  modified_base 17: mod_base = OTHER; note = 2'O-methyl-guanosine
  modified_base 18: mod_base = OTHER; note = 2'O-methyl-guanosine
  modified_base 19: mod_base = OTHER; note = 2'O-methyl-uridine
  modified_base 20: mod_base = OTHER; note = 2'O-methyl-uridine
  modified_base 21: mod_base = OTHER; note = 2'O-methyl-guanosine
  modified_base 22: mod_base = OTHER; note = 2'O-methyl-uridine
  modified_base 23: mod_base = OTHER; note = 2'O-methyl-guanosine
  modified_base 1..2: mod_base = OTHER; note = phosphorothioate linkage
  modified_base 2..3: mod_base = OTHER; note = phosphorothioate linkage
  modified_base 21..22: mod_base = OTHER; note = phosphorothioate linkage
  modified_base 22..23: mod_base = OTHER; note = phosphorothioate linkage
  source 1..23: mol_type = other RNA
ttcagccggaagttgtggttgtg

SEQ ID NO: 377 - RNA, 23 nt, synthetic construct
  misc_feature 1..23: note = siRNA sequence name:ETXS262
  modified_base 1: mod_base = OTHER; note = 2'O-methyl-uridine
  modified_base 2: mod_base = OTHER; note = 2' Fluoro-guanosine
  modified_base 3: mod_base = OTHER; note = 2'O-methyl-uridine
  modified_base 4: mod_base = OTHER; note = 2'O-methyl-uridine
  modified_base 5: mod_base = OTHER; note = 2'O-methyl-uridine
  modified_base 6: mod_base = OTHER; note = 2' Fluoro-guanosine
  modified_base 7: mod_base = OTHER; note = 2'O-methyl-uridine
  modified_base 8: mod_base = OTHER; note = 2' Fluoro-cytidine
  modified_base 9: mod_base = OTHER; note = 2'Fluoro-adenosine
  modified_base 10: mod_base = OTHER; note = 2'O-methyl-uridine
  modified_base 11: mod_base = OTHER; note = 2'O-methyl-guanosine
  modified_base 12: mod_base = OTHER; note = 2'O-methyl-cytidine
  modified_base 13: mod_base = OTHER; note = 2'O-methyl-uridine
  modified_base 14: mod_base = OTHER; note = 2' Fluoro-uridine
  modified_base 15: mod_base = OTHER; note = 2'O-methyl-uridine
  modified_base 16: mod_base = OTHER; note = 2' Fluoro-uridine
  modified_base 17: mod_base = OTHER; note = 2'O-methyl-uridine
  modified_base 18: mod_base = OTHER; note = 2'O-methyl-uridine
  modified_base 19: mod_base = OTHER; note = 2'O-methyl-guanosine
  modified_base 20: mod_base = OTHER; note = 2'O-methyl-cytidine
  modified_base 21: mod_base = OTHER; note = 2'O-methyl-cytidine
  modified_base 22: mod_base = OTHER; note = 2'O-methyl-adenosine
  modified_base 23: mod_base = OTHER; note = 2'O-methyl-uridine
  modified_base 1..2: mod_base = OTHER; note = phosphorothioate linkage
  modified_base 2..3: mod_base = OTHER; note = phosphorothioate linkage
  modified_base 21..22: mod_base = OTHER; note = phosphorothioate linkage
  modified_base 22..23: mod_base = OTHER; note = phosphorothioate linkage
  source 1..23: mol_type = other RNA
tgtttgtcatgcttttttgccat

SEQ ID NO: 378 - RNA, 23 nt, synthetic construct
  misc_feature 1..23: note = siRNA sequence name:ETXS264
  modified_base 1: mod_base = OTHER; note = 2'O-methyl-adenosine
  modified_base 2: mod_base = OTHER; note = 2' Fluoro-uridine
  modified_base 3: mod_base = OTHER; note = 2'O-methyl-uridine
  modified_base 4: mod_base = OTHER; note = 2'O-methyl-uridine
  modified_base 5: mod_base = OTHER; note = 2'O-methyl-cytidine
  modified_base 6: mod_base = OTHER; note = 2' Fluoro-cytidine
  modified_base 7: mod_base = OTHER; note = 2'O-methyl-adenosine
  modified_base 8: mod_base = OTHER; note = 2' Fluoro-cytidine
  modified_base 9: mod_base = OTHER; note = 2' Fluoro-uridine
  modified_base 10: mod_base = OTHER; note = 2'O-methyl-guanosine
  modified_base 11: mod_base = OTHER; note = 2'O-methyl-guanosine
  modified_base 12: mod_base = OTHER; note = 2'O-methyl-guanosine
  modified_base 13: mod_base = OTHER; note = 2'O-methyl-adenosine
  modified_base 14: mod_base = OTHER; note = 2'Fluoro-adenosine
  modified_base 15: mod_base = OTHER; note = 2'O-methyl-uridine
  modified_base 16: mod_base = OTHER; note = 2' Fluoro-uridine
  modified_base 17: mod_base = OTHER; note = 2'O-methyl-uridine
  modified_base 18: mod_base = OTHER; note = 2'O-methyl-adenosine
  modified_base 19: mod_base = OTHER; note = 2'O-methyl-uridine
  modified_base 20: mod_base = OTHER; note = 2'O-methyl-uridine
  modified_base 21: mod_base = OTHER; note = 2'O-methyl-cytidine
  modified_base 22: mod_base = OTHER; note = 2'O-methyl-adenosine
  modified_base 23: mod_base = OTHER; note = 2'O-methyl-cytidine
  modified_base 1..2: mod_base = OTHER; note = phosphorothioate linkage
  modified_base 2..3: mod_base = OTHER; note = phosphorothioate linkage
  modified_base 21..22: mod_base = OTHER; note = phosphorothioate linkage
  modified_base 22..23: mod_base = OTHER; note = phosphorothioate linkage
  source 1..23: mol_type = other RNA
atttccactgggaatttattcac

SEQ ID NO: 379 - RNA, 23 nt, synthetic construct
  misc_feature 1..23: note = siRNA sequence name:ETXS266
  modified_base 1: mod_base = OTHER; note = 2'O-methyl-adenosine
  modified_base 2: mod_base = OTHER; note = 2' Fluoro-cytidine
  modified_base 3: mod_base = OTHER; note = 2'O-methyl-adenosine
  modified_base 4: mod_base = OTHER; note = 2'O-methyl-adenosine
  modified_base 5: mod_base = OTHER; note = 2'O-methyl-uridine
  modified_base 6: mod_base = OTHER; note = 2' Fluoro-uridine
  modified_base 7: mod_base = OTHER; note = 2'O-methyl-adenosine
  modified_base 8: mod_base = OTHER; note = 2' Fluoro-guanosine
  modified_base 9: mod_base = OTHER; note = 2' Fluoro-cytidine
  modified_base 10: mod_base = OTHER; note = 2'O-methyl-adenosine
  modified_base 11: mod_base = OTHER; note = 2'O-methyl-uridine
  modified_base 12: mod_base = OTHER; note = 2'O-methyl-guanosine
  modified_base 13: mod_base = OTHER; note = 2'O-methyl-cytidine
  modified_base 14: mod_base = OTHER; note = 2' Fluoro-uridine
  modified_base 15: mod_base = OTHER; note = 2'O-methyl-guanosine
  modified_base 16: mod_base = OTHER; note = 2'Fluoro-adenosine
  modified_base 17: mod_base = OTHER; note = 2'O-methyl-uridine
  modified_base 18: mod_base = OTHER; note = 2'O-methyl-guanosine
  modified_base 19: mod_base = OTHER; note = 2'O-methyl-cytidine
  modified_base 20: mod_base = OTHER; note = 2'O-methyl-cytidine
  modified_base 21: mod_base = OTHER; note = 2'O-methyl-cytidine
  modified_base 22: mod_base = OTHER; note = 2'O-methyl-cytidine
  modified_base 23: mod_base = OTHER; note = 2'O-methyl-cytidine
  modified_base 1..2: mod_base = OTHER; note = phosphorothioate linkage
  modified_base 2..3: mod_base = OTHER; note = phosphorothioate linkage
  modified_base 21..22: mod_base = OTHER; note = phosphorothioate linkage
  modified_base 22..23: mod_base = OTHER; note = phosphorothioate linkage
  source 1..23: mol_type = other RNA
acaattagcatgctgatgccccc

SEQ ID NO: 380 - RNA, 23 nt, synthetic construct
  misc_feature 1..23: note = siRNA sequence name:ETXS268
  modified_base 1: mod_base = OTHER; note = 2'O-methyl-guanosine
  modified_base 2: mod_base = OTHER; note = 2' Fluoro-uridine
  modified_base 3: mod_base = OTHER; note = 2'O-methyl-uridine
  modified_base 4: mod_base = OTHER; note = 2'O-methyl-cytidine
  modified_base 5: mod_base = OTHER; note = 2'O-methyl-uridine
  modified_base 6: mod_base = OTHER; note = 2' Fluoro-guanosine
  modified_base 7: mod_base = OTHER; note = 2'O-methyl-uridine
  modified_base 8: mod_base = OTHER; note = 2' Fluoro-uridine
  modified_base 9: mod_base = OTHER; note = 2' Fluoro-uridine
  modified_base 10: mod_base = OTHER; note = 2'O-methyl-guanosine
  modified_base 11: mod_base = OTHER; note = 2'O-methyl-uridine
  modified_base 12: mod_base = OTHER; note = 2'O-methyl-cytidine
  modified_base 13: mod_base = OTHER; note = 2'O-methyl-adenosine
  modified_base 14: mod_base = OTHER; note = 2' Fluoro-uridine
  modified_base 15: mod_base = OTHER; note = 2'O-methyl-guanosine
  modified_base 16: mod_base = OTHER; note = 2' Fluoro-cytidine
  modified_base 17: mod_base = OTHER; note = 2'O-methyl-uridine
  modified_base 18: mod_base = OTHER; note = 2'O-methyl-uridine
  modified_base 19: mod_base = OTHER; note = 2'O-methyl-uridine
  modified_base 20: mod_base = OTHER; note = 2'O-methyl-uridine
  modified_base 21: mod_base = OTHER; note = 2'O-methyl-uridine
  modified_base 22: mod_base = OTHER; note = 2'O-methyl-uridine
  modified_base 23: mod_base = OTHER; note = 2'O-methyl-guanosine
  modified_base 1..2: mod_base = OTHER; note = phosphorothioate linkage
  modified_base 2..3: mod_base = OTHER; note = phosphorothioate linkage
  modified_base 21..22: mod_base = OTHER; note = phosphorothioate linkage
  modified_base 22..23: mod_base = OTHER; note = phosphorothioate linkage
  source 1..23: mol_type = other RNA
gttctgtttgtcatgcttttttg

SEQ ID NO: 381 - RNA, 23 nt, synthetic construct
  misc_feature 1..23: note = siRNA sequence name:ETXS270
  modified_base 1: mod_base = OTHER; note = 2'O-methyl-guanosine
  modified_base 2: mod_base = OTHER; note = 2' Fluoro-guanosine
  modified_base 3: mod_base = OTHER; note = 2'O-methyl-cytidine
  modified_base 4: mod_base = OTHER; note = 2'O-methyl-cytidine
  modified_base 5: mod_base = OTHER; note = 2'O-methyl-uridine
  modified_base 6: mod_base = OTHER; note = 2' Fluoro-cytidine
  modified_base 7: mod_base = OTHER; note = 2'O-methyl-adenosine
  modified_base 8: mod_base = OTHER; note = 2' Fluoro-guanosine
  modified_base 9: mod_base = OTHER; note = 2' Fluoro-cytidine
  modified_base 10: mod_base = OTHER; note = 2'O-methyl-adenosine
  modified_base 11: mod_base = OTHER; note = 2'O-methyl-adenosine
  modified_base 12: mod_base = OTHER; note = 2'O-methyl-adenosine
  modified_base 13: mod_base = OTHER; note = 2'O-methyl-guanosine
  modified_base 14: mod_base = OTHER; note = 2' Fluoro-uridine
  modified_base 15: mod_base = OTHER; note = 2'O-methyl-adenosine
  modified_base 16: mod_base = OTHER; note = 2'Fluoro-adenosine
  modified_base 17: mod_base = OTHER; note = 2'O-methyl-uridine
  modified_base 18: mod_base = OTHER; note = 2'O-methyl-adenosine
  modified_base 19: mod_base = OTHER; note = 2'O-methyl-cytidine
  modified_base 20: mod_base = OTHER; note = 2'O-methyl-uridine
  modified_base 21: mod_base = OTHER; note = 2'O-methyl-cytidine
  modified_base 22: mod_base = OTHER; note = 2'O-methyl-uridine
  modified_base 23: mod_base = OTHER; note = 2'O-methyl-cytidine
  modified_base 1..2: mod_base = OTHER; note = phosphorothioate linkage
  modified_base 2..3: mod_base = OTHER; note = phosphorothioate linkage
  modified_base 21..22: mod_base = OTHER; note = phosphorothioate linkage
  modified_base 22..23: mod_base = OTHER; note = phosphorothioate linkage
  source 1..23: mol_type = other RNA
ggcctcagcaaagtaatactctc

SEQ ID NO: 382 - RNA, 23 nt, synthetic construct
  misc_feature 1..23: note = siRNA sequence name:ETXS272
  modified_base 1: mod_base = OTHER; note = 2'O-methyl-cytidine
  modified_base 2: mod_base = OTHER; note = 2' Fluoro-uridine
  modified_base 3: mod_base = OTHER; note = 2'O-methyl-cytidine
  modified_base 4: mod_base = OTHER; note = 2'O-methyl-uridine
  modified_base 5: mod_base = OTHER; note = 2'O-methyl-cytidine
  modified_base 6: mod_base = OTHER; note = 2' Fluoro-cytidine
  modified_base 7: mod_base = OTHER; note = 2'O-methyl-cytidine
  modified_base 8: mod_base = OTHER; note = 2' Fluoro-uridine
  modified_base 9: mod_base = OTHER; note = 2' Fluoro-uridine
  modified_base 10: mod_base = OTHER; note = 2'O-methyl-cytidine
  modified_base 11: mod_base = OTHER; note = 2'O-methyl-adenosine
  modified_base 12: mod_base = OTHER; note = 2'O-methyl-guanosine
  modified_base 13: mod_base = OTHER; note = 2'O-methyl-adenosine
  modified_base 14: mod_base = OTHER; note = 2' Fluoro-cytidine
  modified_base 15: mod_base = OTHER; note = 2'O-methyl-cytidine
  modified_base 16: mod_base = OTHER; note = 2' Fluoro-uridine
  modified_base 17: mod_base = OTHER; note = 2'O-methyl-adenosine
  modified_base 18: mod_base = OTHER; note = 2'O-methyl-adenosine
  modified_base 19: mod_base = OTHER; note = 2'O-methyl-guanosine
  modified_base 20: mod_base = OTHER; note = 2'O-methyl-guanosine
  modified_base 21: mod_base = OTHER; note = 2'O-methyl-adenosine
  modified_base 22: mod_base = OTHER; note = 2'O-methyl-adenosine
  modified_base 23: mod_base = OTHER; note = 2'O-methyl-adenosine
  modified_base 1..2: mod_base = OTHER; note = phosphorothioate linkage
  modified_base 2..3: mod_base = OTHER; note = phosphorothioate linkage
  modified_base 21..22: mod_base = OTHER; note = phosphorothioate linkage
  modified_base 22..23: mod_base = OTHER; note = phosphorothioate linkage
  source 1..23: mol_type = other RNA
ctctcccttcagacctaaggaaa

SEQ ID NO: 383 - RNA, 23 nt, synthetic construct
  misc_feature 1..23: note = siRNA sequence name:ETXS274
  modified_base 1: mod_base = OTHER; note = 2'O-methyl-uridine
  modified_base 2: mod_base = OTHER; note = 2' Fluoro-guanosine
  modified_base 3: mod_base = OTHER; note = 2'O-methyl-guanosine
  modified_base 4: mod_base = OTHER; note = 2'O-methyl-uridine
  modified_base 5: mod_base = OTHER; note = 2'O-methyl-guanosine
  modified_base 6: mod_base = OTHER; note = 2' Fluoro-cytidine
  modified_base 7: mod_base = OTHER; note = 2'O-methyl-uridine
  modified_base 8: mod_base = OTHER; note = 2' Fluoro-uridine
  modified_base 9: mod_base = OTHER; note = 2' Fluoro-guanosine
  modified_base 10: mod_base = OTHER; note = 2'O-methyl-adenosine
  modified_base 11: mod_base = OTHER; note = 2'O-methyl-adenosine
  modified_base 12: mod_base = OTHER; note = 2'O-methyl-cytidine
  modified_base 13: mod_base = OTHER; note = 2'O-methyl-adenosine
  modified_base 14: mod_base = OTHER; note = 2' Fluoro-guanosine
  modified_base 15: mod_base = OTHER; note = 2'O-methyl-guanosine
  modified_base 16: mod_base = OTHER; note = 2' Fluoro-uridine
  modified_base 17: mod_base = OTHER; note = 2'O-methyl-cytidine
  modified_base 18: mod_base = OTHER; note = 2'O-methyl-guanosine
  modified_base 19: mod_base = OTHER; note = 2'O-methyl-adenosine
  modified_base 20: mod_base = OTHER; note = 2'O-methyl-uridine
  modified_base 21: mod_base = OTHER; note = 2'O-methyl-guanosine
  modified_base 22: mod_base = OTHER; note = 2'O-methyl-guanosine
  modified_base 23: mod_base = OTHER; note = 2'O-methyl-cytidine
  modified_base 1..2: mod_base = OTHER; note = phosphorothioate linkage
  modified_base 2..3: mod_base = OTHER; note = phosphorothioate linkage
  modified_base 21..22: mod_base = OTHER; note = phosphorothioate linkage
  modified_base 22..23: mod_base = OTHER; note = phosphorothioate linkage
  source 1..23: mol_type = other RNA
tggtgcttgaacaggtcgatggc

SEQ ID NO: 384 - RNA, 23 nt, synthetic construct
  misc_feature 1..23: note = siRNA sequence name:ETXS276
  modified_base 1: mod_base = OTHER; note = 2'O-methyl-cytidine
  modified_base 2: mod_base = OTHER; note = 2' Fluoro-uridine
  modified_base 3: mod_base = OTHER; note = 2'O-methyl-uridine
  modified_base 4: mod_base = OTHER; note = 2'O-methyl-uridine
  modified_base 5: mod_base = OTHER; note = 2'O-methyl-uridine
  modified_base 6: mod_base = OTHER; note = 2'Fluoro-adenosine
  modified_base 7: mod_base = OTHER; note = 2'O-methyl-uridine
  modified_base 8: mod_base = OTHER; note = 2' Fluoro-guanosine
  modified_base 9: mod_base = OTHER; note = 2'Fluoro-adenosine
  modified_base 10: mod_base = OTHER; note = 2'O-methyl-guanosine
  modified_base 11: mod_base = OTHER; note = 2'O-methyl-guanosine
  modified_base 12: mod_base = OTHER; note = 2'O-methyl-cytidine
  modified_base 13: mod_base = OTHER; note = 2'O-methyl-cytidine
  modified_base 14: mod_base = OTHER; note = 2' Fluoro-cytidine
  modified_base 15: mod_base = OTHER; note = 2'O-methyl-uridine
  modified_base 16: mod_base = OTHER; note = 2' Fluoro-uridine
  modified_base 17: mod_base = OTHER; note = 2'O-methyl-guanosine
  modified_base 18: mod_base = OTHER; note = 2'O-methyl-guanosine
  modified_base 19: mod_base = OTHER; note = 2'O-methyl-uridine
  modified_base 20: mod_base = OTHER; note = 2'O-methyl-guanosine
  modified_base 21: mod_base = OTHER; note = 2'O-methyl-adenosine
  modified_base 22: mod_base = OTHER; note = 2'O-methyl-guanosine
  modified_base 23: mod_base = OTHER; note = 2'O-methyl-cytidine
  modified_base 1..2: mod_base = OTHER; note = phosphorothioate linkage
  modified_base 2..3: mod_base = OTHER; note = phosphorothioate linkage
  modified_base 21..22: mod_base = OTHER; note = phosphorothioate linkage
  modified_base 22..23: mod_base = OTHER; note = phosphorothioate linkage
  source 1..23: mol_type = other RNA
cttttatgaggcccttggtgagc

SEQ ID NO: 385 - RNA, 23 nt, synthetic construct
  misc_feature 1..23: note = siRNA sequence name:ETXS278
  modified_base 1: mod_base = OTHER; note = 2'O-methyl-cytidine
  modified_base 2: mod_base = OTHER; note = 2'Fluoro-adenosine
  modified_base 3: mod_base = OTHER; note = 2'O-methyl-uridine
  modified_base 4: mod_base = OTHER; note = 2'O-methyl-uridine
  modified_base 5: mod_base = OTHER; note = 2'O-methyl-uridine
  modified_base 6: mod_base = OTHER; note = 2' Fluoro-cytidine
  modified_base 7: mod_base = OTHER; note = 2'O-methyl-cytidine
  modified_base 8: mod_base = OTHER; note = 2'Fluoro-adenosine
  modified_base 9: mod_base = OTHER; note = 2' Fluoro-cytidine
  modified_base 10: mod_base = OTHER; note = 2'O-methyl-uridine
  modified_base 11: mod_base = OTHER; note = 2'O-methyl-guanosine
  modified_base 12: mod_base = OTHER; note = 2'O-methyl-guanosine
  modified_base 13: mod_base = OTHER; note = 2'O-methyl-guanosine
  modified_base 14: mod_base = OTHER; note = 2'Fluoro-adenosine
  modified_base 15: mod_base = OTHER; note = 2'O-methyl-adenosine
  modified_base 16: mod_base = OTHER; note = 2' Fluoro-uridine
  modified_base 17: mod_base = OTHER; note = 2'O-methyl-uridine
  modified_base 18: mod_base = OTHER; note = 2'O-methyl-uridine
  modified_base 19: mod_base = OTHER; note = 2'O-methyl-adenosine
  modified_base 20: mod_base = OTHER; note = 2'O-methyl-uridine
  modified_base 21: mod_base = OTHER; note = 2'O-methyl-uridine
  modified_base 22: mod_base = OTHER; note = 2'O-methyl-cytidine
  modified_base 23: mod_base = OTHER; note = 2'O-methyl-adenosine
  modified_base 1..2: mod_base = OTHER; note = phosphorothioate linkage
  modified_base 2..3: mod_base = OTHER; note = phosphorothioate linkage
  modified_base 21..22: mod_base = OTHER; note = phosphorothioate linkage
  modified_base 22..23: mod_base = OTHER; note = phosphorothioate linkage
  source 1..23: mol_type = other RNA
catttccactgggaatttattca

SEQ ID NO: 386 - RNA, 23 nt, synthetic construct
  misc_feature 1..23: note = siRNA sequence name:ETXS280
  modified_base 1: mod_base = OTHER; note = 2'O-methyl-cytidine
  modified_base 2: mod_base = OTHER; note = 2' Fluoro-uridine
  modified_base 3: mod_base = OTHER; note = 2'O-methyl-guanosine
  modified_base 4: mod_base = OTHER; note = 2'O-methyl-uridine
  modified_base 5: mod_base = OTHER; note = 2'O-methyl-uridine
  modified_base 6: mod_base = OTHER; note = 2' Fluoro-uridine
  modified_base 7: mod_base = OTHER; note = 2'O-methyl-guanosine
  modified_base 8: mod_base = OTHER; note = 2' Fluoro-uridine
  modified_base 9: mod_base = OTHER; note = 2' Fluoro-cytidine
  modified_base 10: mod_base = OTHER; note = 2'O-methyl-adenosine
  modified_base 11: mod_base = OTHER; note = 2'O-methyl-uridine
  modified_base 12: mod_base = OTHER; note = 2'O-methyl-guanosine
  modified_base 13: mod_base = OTHER; note = 2'O-methyl-cytidine
  modified_base 14: mod_base = OTHER; note = 2' Fluoro-uridine
  modified_base 15: mod_base = OTHER; note = 2'O-methyl-uridine
  modified_base 16: mod_base = OTHER; note = 2' Fluoro-uridine
  modified_base 17: mod_base = OTHER; note = 2'O-methyl-uridine
  modified_base 18: mod_base = OTHER; note = 2'O-methyl-uridine
  modified_base 19: mod_base = OTHER; note = 2'O-methyl-uridine
  modified_base 20: mod_base = OTHER; note = 2'O-methyl-guanosine
  modified_base 21: mod_base = OTHER; note = 2'O-methyl-cytidine
  modified_base 22: mod_base = OTHER; note = 2'O-methyl-cytidine
  modified_base 23: mod_base = OTHER; note = 2'O-methyl-adenosine
  modified_base 1..2: mod_base = OTHER; note = phosphorothioate linkage
  modified_base 2..3: mod_base = OTHER; note = phosphorothioate linkage
  modified_base 21..22: mod_base = OTHER; note = phosphorothioate linkage
  modified_base 22..23: mod_base = OTHER; note = phosphorothioate linkage
  source 1..23: mol_type = other RNA
ctgtttgtcatgcttttttgcca

SEQ ID NO: 387 - RNA, 23 nt, synthetic construct
  misc_feature 1..23: note = siRNA sequence name:ETXS282
  modified_base 1: mod_base = OTHER; note = 2'O-methyl-cytidine
  modified_base 2: mod_base = OTHER; note = 2' Fluoro-uridine
  modified_base 3: mod_base = OTHER; note = 2'O-methyl-cytidine
  modified_base 4: mod_base = OTHER; note = 2'O-methyl-uridine
  modified_base 5: mod_base = OTHER; note = 2'O-methyl-cytidine
  modified_base 6: mod_base = OTHER; note = 2' Fluoro-uridine
  modified_base 7: mod_base = OTHER; note = 2'O-methyl-cytidine
  modified_base 8: mod_base = OTHER; note = 2' Fluoro-uridine
  modified_base 9: mod_base = OTHER; note = 2' Fluoro-cytidine
  modified_base 10: mod_base = OTHER; note = 2'O-methyl-adenosine
  modified_base 11: mod_base = OTHER; note = 2'O-methyl-uridine
  modified_base 12: mod_base = OTHER; note = 2'O-methyl-uridine
  modified_base 13: mod_base = OTHER; note = 2'O-methyl-cytidine
  modified_base 14: mod_base = OTHER; note = 2'Fluoro-adenosine
  modified_base 15: mod_base = OTHER; note = 2'O-methyl-guanosine
  modified_base 16: mod_base = OTHER; note = 2' Fluoro-cytidine
  modified_base 17: mod_base = OTHER; note = 2'O-methyl-cytidine
  modified_base 18: mod_base = OTHER; note = 2'O-methyl-guanosine
  modified_base 19: mod_base = OTHER; note = 2'O-methyl-guanosine
  modified_base 20: mod_base = OTHER; note = 2'O-methyl-adenosine
  modified_base 21: mod_base = OTHER; note = 2'O-methyl-adenosine
  modified_base 22: mod_base = OTHER; note = 2'O-methyl-guanosine
  modified_base 23: mod_base = OTHER; note = 2'O-methyl-uridine
  modified_base 1..2: mod_base = OTHER; note = phosphorothioate linkage
  modified_base 2..3: mod_base = OTHER; note = phosphorothioate linkage
  modified_base 21..22: mod_base = OTHER; note = phosphorothioate linkage
  modified_base 22..23: mod_base = OTHER; note = phosphorothioate linkage
  source 1..23: mol_type = other RNA
ctctctctcattcagccggaagt

SEQ ID NO: 388 - RNA, 23 nt, synthetic construct
  misc_feature 1..23: note = siRNA sequence name:ETXS284
  modified_base 1: mod_base = OTHER; note = 2'O-methyl-cytidine
  modified_base 2: mod_base = OTHER; note = 2' Fluoro-uridine
  modified_base 3: mod_base = OTHER; note = 2'O-methyl-cytidine
  modified_base 4: mod_base = OTHER; note = 2'O-methyl-guanosine
  modified_base 5: mod_base = OTHER; note = 2'O-methyl-adenosine
  modified_base 6: mod_base = OTHER; note = 2' Fluoro-guanosine
  modified_base 7: mod_base = OTHER; note = 2'O-methyl-uridine
  modified_base 8: mod_base = OTHER; note = 2' Fluoro-uridine
  modified_base 9: mod_base = OTHER; note = 2' Fluoro-cytidine
  modified_base 10: mod_base = OTHER; note = 2'O-methyl-uridine
  modified_base 11: mod_base = OTHER; note = 2'O-methyl-guanosine
  modified_base 12: mod_base = OTHER; note = 2'O-methyl-uridine
  modified_base 13: mod_base = OTHER; note = 2'O-methyl-uridine
  modified_base 14: mod_base = OTHER; note = 2' Fluoro-uridine
  modified_base 15: mod_base = OTHER; note = 2'O-methyl-guanosine
  modified_base 16: mod_base = OTHER; note = 2' Fluoro-uridine
  modified_base 17: mod_base = OTHER; note = 2'O-methyl-cytidine
  modified_base 18: mod_base = OTHER; note = 2'O-methyl-adenosine
  modified_base 19: mod_base = OTHER; note = 2'O-methyl-uridine
  modified_base 20: mod_base = OTHER; note = 2'O-methyl-guanosine
  modified_base 21: mod_base = OTHER; note = 2'O-methyl-cytidine
  modified_base 22: mod_base = OTHER; note = 2'O-methyl-uridine
  modified_base 23: mod_base = OTHER; note = 2'O-methyl-uridine
  modified_base 1..2: mod_base = OTHER; note = phosphorothioate linkage
  modified_base 2..3: mod_base = OTHER; note = phosphorothioate linkage
  modified_base 21..22: mod_base = OTHER; note = phosphorothioate linkage
  modified_base 22..23: mod_base = OTHER; note = phosphorothioate linkage
  source 1..23: mol_type = other RNA
ctcgagttctgtttgtcatgctt

SEQ ID NO: 389 - RNA, 23 nt, synthetic construct
  misc_feature 1..23: note = siRNA sequence name:ETXS286
  modified_base 1: mod_base = OTHER; note = 2'O-methyl-cytidine
  modified_base 2: mod_base = OTHER; note = 2'Fluoro-adenosine
  modified_base 3: mod_base = OTHER; note = 2'O-methyl-cytidine
  modified_base 4: mod_base = OTHER; note = 2'O-methyl-uridine
  modified_base 5: mod_base = OTHER; note = 2'O-methyl-cytidine
  modified_base 6: mod_base = OTHER; note = 2' Fluoro-uridine
  modified_base 7: mod_base = OTHER; note = 2'O-methyl-uridine
  modified_base 8: mod_base = OTHER; note = 2' Fluoro-cytidine
  modified_base 9: mod_base = OTHER; note = 2' Fluoro-cytidine
  modified_base 10: mod_base = OTHER; note = 2'O-methyl-cytidine
  modified_base 11: mod_base = OTHER; note = 2'O-methyl-adenosine
  modified_base 12: mod_base = OTHER; note = 2'O-methyl-uridine
  modified_base 13: mod_base = OTHER; note = 2'O-methyl-guanosine
  modified_base 14: mod_base = OTHER; note = 2'Fluoro-adenosine
  modified_base 15: mod_base = OTHER; note = 2'O-methyl-adenosine
  modified_base 16: mod_base = OTHER; note = 2' Fluoro-guanosine
  modified_base 17: mod_base = OTHER; note = 2'O-methyl-adenosine
  modified_base 18: mod_base = OTHER; note = 2'O-methyl-guanosine
  modified_base 19: mod_base = OTHER; note = 2'O-methyl-cytidine
  modified_base 20: mod_base = OTHER; note = 2'O-methyl-adenosine
  modified_base 21: mod_base = OTHER; note = 2'O-methyl-guanosine
  modified_base 22: mod_base = OTHER; note = 2'O-methyl-guanosine
  modified_base 23: mod_base = OTHER; note = 2'O-methyl-cytidine
  modified_base 1..2: mod_base = OTHER; note = phosphorothioate linkage
  modified_base 2..3: mod_base = OTHER; note = phosphorothioate linkage
  modified_base 21..22: mod_base = OTHER; note = phosphorothioate linkage
  modified_base 22..23: mod_base = OTHER; note = phosphorothioate linkage
  source 1..23: mol_type = other RNA
cactcttcccatgaagagcaggc

SEQ ID NO: 390 - RNA, 23 nt, synthetic construct
  misc_feature 1..23: note = siRNA sequence name:ETXS288
  modified_base 1: mod_base = OTHER; note = 2'O-methyl-guanosine
  modified_base 2: mod_base = OTHER; note = 2' Fluoro-cytidine
  modified_base 3: mod_base = OTHER; note = 2'O-methyl-cytidine
  modified_base 4: mod_base = OTHER; note = 2'O-methyl-uridine
  modified_base 5: mod_base = OTHER; note = 2'O-methyl-cytidine
  modified_base 6: mod_base = OTHER; note = 2'Fluoro-adenosine
  modified_base 7: mod_base = OTHER; note = 2'O-methyl-guanosine
  modified_base 8: mod_base = OTHER; note = 2' Fluoro-cytidine
  modified_base 9: mod_base = OTHER; note = 2'Fluoro-adenosine
  modified_base 10: mod_base = OTHER; note = 2'O-methyl-adenosine
  modified_base 11: mod_base = OTHER; note = 2'O-methyl-adenosine
  modified_base 12: mod_base = OTHER; note = 2'O-methyl-guanosine
  modified_base 13: mod_base = OTHER; note = 2'O-methyl-uridine
  modified_base 14: mod_base = OTHER; note = 2'Fluoro-adenosine
  modified_base 15: mod_base = OTHER; note = 2'O-methyl-adenosine
  modified_base 16: mod_base = OTHER; note = 2' Fluoro-uridine
  modified_base 17: mod_base = OTHER; note = 2'O-methyl-adenosine
  modified_base 18: mod_base = OTHER; note = 2'O-methyl-cytidine
  modified_base 19: mod_base = OTHER; note = 2'O-methyl-uridine
  modified_base 20: mod_base = OTHER; note = 2'O-methyl-cytidine
  modified_base 21: mod_base = OTHER; note = 2'O-methyl-uridine
  modified_base 22: mod_base = OTHER; note = 2'O-methyl-cytidine
  modified_base 23: mod_base = OTHER; note = 2'O-methyl-uridine
  modified_base 1..2: mod_base = OTHER; note = phosphorothioate linkage
  modified_base 2..3: mod_base = OTHER; note = phosphorothioate linkage
  modified_base 21..22: mod_base = OTHER; note = phosphorothioate linkage
  modified_base 22..23: mod_base = OTHER; note = phosphorothioate linkage
  source 1..23: mol_type = other RNA
gcctcagcaaagtaatactctct

SEQ ID NO: 391 - RNA, 23 nt, synthetic construct
  misc_feature 1..23: note = siRNA sequence name:ETXS290
  modified_base 1: mod_base = OTHER; note = 2'O-methyl-uridine
  modified_base 2: mod_base = OTHER; note = 2'Fluoro-adenosine
  modified_base 3: mod_base = OTHER; note = 2'O-methyl-cytidine
  modified_base 4: mod_base = OTHER; note = 2'O-methyl-cytidine
  modified_base 5: mod_base = OTHER; note = 2'O-methyl-cytidine
  modified_base 6: mod_base = OTHER; note = 2'Fluoro-adenosine
  modified_base 7: mod_base = OTHER; note = 2'O-methyl-adenosine
  modified_base 8: mod_base = OTHER; note = 2'Fluoro-adenosine
  modified_base 9: mod_base = OTHER; note = 2'Fluoro-adenosine
  modified_base 10: mod_base = OTHER; note = 2'O-methyl-uridine
  modified_base 11: mod_base = OTHER; note = 2'O-methyl-uridine
  modified_base 12: mod_base = OTHER; note = 2'O-methyl-cytidine
  modified_base 13: mod_base = OTHER; note = 2'O-methyl-cytidine
  modified_base 14: mod_base = OTHER; note = 2' Fluoro-uridine
  modified_base 15: mod_base = OTHER; note = 2'O-methyl-cytidine
  modified_base 16: mod_base = OTHER; note = 2' Fluoro-cytidine
  modified_base 17: mod_base = OTHER; note = 2'O-methyl-uridine
  modified_base 18: mod_base = OTHER; note = 2'O-methyl-guanosine
  modified_base 19: mod_base = OTHER; note = 2'O-methyl-adenosine
  modified_base 20: mod_base = OTHER; note = 2'O-methyl-adenosine
  modified_base 21: mod_base = OTHER; note = 2'O-methyl-guanosine
  modified_base 22: mod_base = OTHER; note = 2'O-methyl-adenosine
  modified_base 23: mod_base = OTHER; note = 2'O-methyl-guanosine
  modified_base 1..2: mod_base = OTHER; note = phosphorothioate linkage
  modified_base 2..3: mod_base = OTHER; note = phosphorothioate linkage
  modified_base 21..22: mod_base = OTHER; note = phosphorothioate linkage
  modified_base 22..23: mod_base = OTHER; note = phosphorothioate linkage
  source 1..23: mol_type = other RNA
tacccaaaattcctcctgaagag

SEQ ID NO: 392 - RNA, 23 nt, synthetic construct
  misc_feature 1..23: note = siRNA sequence name:ETXS292
  modified_base 1: mod_base = OTHER; note = 2'O-methyl-cytidine
  modified_base 2: mod_base = OTHER; note = 2' Fluoro-guanosine
  modified_base 3: mod_base = OTHER; note = 2'O-methyl-adenosine
  modified_base 4: mod_base = OTHER; note = 2'O-methyl-guanosine
  modified_base 5: mod_base = OTHER; note = 2'O-methyl-uridine
  modified_base 6: mod_base = OTHER; note = 2' Fluoro-uridine
  modified_base 7: mod_base = OTHER; note = 2'O-methyl-cytidine
  modified_base 8: mod_base = OTHER; note = 2' Fluoro-uridine
  modified_base 9: mod_base = OTHER; note = 2' Fluoro-guanosine
  modified_base 10: mod_base = OTHER; note = 2'O-methyl-uridine
  modified_base 11: mod_base = OTHER; note = 2'O-methyl-uridine
  modified_base 12: mod_base = OTHER; note = 2'O-methyl-uridine
  modified_base 13: mod_base = OTHER; note = 2'O-methyl-guanosine
  modified_base 14: mod_base = OTHER; note = 2' Fluoro-uridine
  modified_base 15: mod_base = OTHER; note = 2'O-methyl-cytidine
  modified_base 16: mod_base = OTHER; note = 2'Fluoro-adenosine
  modified_base 17: mod_base = OTHER; note = 2'O-methyl-uridine
  modified_base 18: mod_base = OTHER; note = 2'O-methyl-guanosine
  modified_base 19: mod_base = OTHER; note = 2'O-methyl-cytidine
  modified_base 20: mod_base = OTHER; note = 2'O-methyl-uridine
  modified_base 21: mod_base = OTHER; note = 2'O-methyl-uridine
  modified_base 22: mod_base = OTHER; note = 2'O-methyl-uridine
  modified_base 23: mod_base = OTHER; note = 2'O-methyl-uridine
  modified_base 1..2: mod_base = OTHER; note = phosphorothioate linkage
  modified_base 2..3: mod_base = OTHER; note = phosphorothioate linkage
  modified_base 21..22: mod_base = OTHER; note = phosphorothioate linkage
  modified_base 22..23: mod_base = OTHER; note = phosphorothioate linkage
  source 1..23: mol_type = other RNA
cgagttctgtttgtcatgctttt

SEQ ID NO: 393 - RNA, 23 nt, synthetic construct
  misc_feature 1..23: note = siRNA sequence name:ETXS294
  modified_base 1: mod_base = OTHER; note = 2'O-methyl-uridine
  modified_base 2: mod_base = OTHER; note = 2' Fluoro-uridine
  modified_base 3: mod_base = OTHER; note = 2'O-methyl-cytidine
  modified_base 4: mod_base = OTHER; note = 2'O-methyl-cytidine
  modified_base 5: mod_base = OTHER; note = 2'O-methyl-adenosine
  modified_base 6: mod_base = OTHER; note = 2' Fluoro-cytidine
  modified_base 7: mod_base = OTHER; note = 2'O-methyl-uridine
  modified_base 8: mod_base = OTHER; note = 2' Fluoro-guanosine
  modified_base 9: mod_base = OTHER; note = 2' Fluoro-guanosine
  modified_base 10: mod_base = OTHER; note = 2'O-methyl-guanosine
  modified_base 11: mod_base = OTHER; note = 2'O-methyl-adenosine
  modified_base 12: mod_base = OTHER; note = 2'O-methyl-adenosine
  modified_base 13: mod_base = OTHER; note = 2'O-methyl-uridine
  modified_base 14: mod_base = OTHER; note = 2' Fluoro-uridine
  modified_base 15: mod_base = OTHER; note = 2'O-methyl-uridine
  modified_base 16: mod_base = OTHER; note = 2'Fluoro-adenosine
  modified_base 17: mod_base = OTHER; note = 2'O-methyl-uridine
  modified_base 18: mod_base = OTHER; note = 2'O-methyl-uridine
  modified_base 19: mod_base = OTHER; note = 2'O-methyl-cytidine
  modified_base 20: mod_base = OTHER; note = 2'O-methyl-adenosine
  modified_base 21: mod_base = OTHER; note = 2'O-methyl-cytidine
  modified_base 22: mod_base = OTHER; note = 2'O-methyl-cytidine
  modified_base 23: mod_base = OTHER; note = 2'O-methyl-cytidine
  modified_base 1..2: mod_base = OTHER; note = phosphorothioate linkage
  modified_base 2..3: mod_base = OTHER; note = phosphorothioate linkage
  modified_base 21..22: mod_base = OTHER; note = phosphorothioate linkage
  modified_base 22..23: mod_base = OTHER; note = phosphorothioate linkage
  source 1..23: mol_type = other RNA
ttccactgggaatttattcaccc

SEQ ID NO: 394 - RNA, 23 nt, synthetic construct
  misc_feature 1..23: note = siRNA sequence name:ETXS296
  modified_base 1: mod_base = OTHER; note = 2'O-methyl-guanosine
  modified_base 2: mod_base = OTHER; note = 2' Fluoro-guanosine
  modified_base 3: mod_base = OTHER; note = 2'O-methyl-adenosine
  modified_base 4: mod_base = OTHER; note = 2'O-methyl-uridine
  modified_base 5: mod_base = OTHER; note = 2'O-methyl-guanosine
  modified_base 6: mod_base = OTHER; note = 2' Fluoro-uridine
  modified_base 7: mod_base = OTHER; note = 2'O-methyl-uridine
  modified_base 8: mod_base = OTHER; note = 2'Fluoro-adenosine
  modified_base 9: mod_base = OTHER; note = 2'Fluoro-adenosine
  modified_base 10: mod_base = OTHER; note = 2'O-methyl-guanosine
  modified_base 11: mod_base = OTHER; note = 2'O-methyl-adenosine
  modified_base 12: mod_base = OTHER; note = 2'O-methyl-cytidine
  modified_base 13: mod_base = OTHER; note = 2'O-methyl-guanosine
  modified_base 14: mod_base = OTHER; note = 2' Fluoro-cytidine
  modified_base 15: mod_base = OTHER; note = 2'O-methyl-uridine
  modified_base 16: mod_base = OTHER; note = 2' Fluoro-guanosine
  modified_base 17: mod_base = OTHER; note = 2'O-methyl-guanosine
  modified_base 18: mod_base = OTHER; note = 2'O-methyl-adenosine
  modified_base 19: mod_base = OTHER; note = 2'O-methyl-uridine
  modified_base 20: mod_base = OTHER; note = 2'O-methyl-cytidine
  modified_base 21: mod_base = OTHER; note = 2'O-methyl-cytidine
  modified_base 22: mod_base = OTHER; note = 2'O-methyl-guanosine
  modified_base 23: mod_base = OTHER; note = 2'O-methyl-guanosine
  modified_base 1..2: mod_base = OTHER; note = phosphorothioate linkage
  modified_base 2..3: mod_base = OTHER; note = phosphorothioate linkage
  modified_base 21..22: mod_base = OTHER; note = phosphorothioate linkage
  modified_base 22..23: mod_base = OTHER; note = phosphorothioate linkage
  source 1..23: mol_type = other RNA
ggatgttaagacgctggatccgg

SEQ ID NO: 395 - RNA, 23 nt, synthetic construct
  misc_feature 1..23: note = siRNA sequence name:ETXS298
  modified_base 1: mod_base = OTHER; note = 2'O-methyl-adenosine
  modified_base 2: mod_base = OTHER; note = 2' Fluoro-cytidine
  modified_base 3: mod_base = OTHER; note = 2'O-methyl-uridine
  modified_base 4: mod_base = OTHER; note = 2'O-methyl-uridine
  modified_base 5: mod_base = OTHER; note = 2'O-methyl-cytidine
  modified_base 6: mod_base = OTHER; note = 2' Fluoro-uridine
  modified_base 7: mod_base = OTHER; note = 2'O-methyl-cytidine
  modified_base 8: mod_base = OTHER; note = 2' Fluoro-guanosine
  modified_base 9: mod_base = OTHER; note = 2'Fluoro-adenosine
  modified_base 10: mod_base = OTHER; note = 2'O-methyl-guanosine
  modified_base 11: mod_base = OTHER; note = 2'O-methyl-uridine
  modified_base 12: mod_base = OTHER; note = 2'O-methyl-uridine
  modified_base 13: mod_base = OTHER; note = 2'O-methyl-cytidine
  modified_base 14: mod_base = OTHER; note = 2' Fluoro-uridine
  modified_base 15: mod_base = OTHER; note = 2'O-methyl-guanosine
  modified_base 16: mod_base = OTHER; note = 2' Fluoro-uridine
  modified_base 17: mod_base = OTHER; note = 2'O-methyl-uridine
  modified_base 18: mod_base = OTHER; note = 2'O-methyl-uridine
  modified_base 19: mod_base = OTHER; note = 2'O-methyl-guanosine
  modified_base 20: mod_base = OTHER; note = 2'O-methyl-uridine
  modified_base 21: mod_base = OTHER; note = 2'O-methyl-cytidine
  modified_base 22: mod_base = OTHER; note = 2'O-methyl-adenosine
  modified_base 23: mod_base = OTHER; note = 2'O-methyl-uridine
  modified_base 1..2: mod_base = OTHER; note = phosphorothioate linkage
  modified_base 2..3: mod_base = OTHER; note = phosphorothioate linkage
  modified_base 21..22: mod_base = OTHER; note = phosphorothioate linkage
  modified_base 22..23: mod_base = OTHER; note = phosphorothioate linkage
  source 1..23: mol_type = other RNA
acttctcgagttctgtttgtcat

SEQ ID NO: 396 - RNA, 23 nt, synthetic construct
  misc_feature 1..23: note = siRNA sequence name:ETXS300
  modified_base 1: mod_base = OTHER; note = 2'O-methyl-guanosine
  modified_base 2: mod_base = OTHER; note = 2' Fluoro-guanosine
  modified_base 3: mod_base = OTHER; note = 2'O-methyl-cytidine
  modified_base 4: mod_base = OTHER; note = 2'O-methyl-guanosine
  modified_base 5: mod_base = OTHER; note = 2'O-methyl-adenosine
  modified_base 6: mod_base = OTHER; note = 2' Fluoro-uridine
  modified_base 7: mod_base = OTHER; note = 2'O-methyl-cytidine
  modified_base 8: mod_base = OTHER; note = 2' Fluoro-cytidine
  modified_base 9: mod_base = OTHER; note = 2' Fluoro-uridine
  modified_base 10: mod_base = OTHER; note = 2'O-methyl-uridine
  modified_base 11: mod_base = OTHER; note = 2'O-methyl-uridine
  modified_base 12: mod_base = OTHER; note = 2'O-methyl-guanosine
  modified_base 13: mod_base = OTHER; note = 2'O-methyl-guanosine
  modified_base 14: mod_base = OTHER; note = 2' Fluoro-uridine
  modified_base 15: mod_base = OTHER; note = 2'O-methyl-cytidine
  modified_base 16: mod_base = OTHER; note = 2' Fluoro-uridine
  modified_base 17: mod_base = OTHER; note = 2'O-methyl-guanosine
  modified_base 18: mod_base = OTHER; note = 2'O-methyl-adenosine
  modified_base 19: mod_base = OTHER; note = 2'O-methyl-guanosine
  modified_base 20: mod_base = OTHER; note = 2'O-methyl-adenosine
  modified_base 21: mod_base = OTHER; note = 2'O-methyl-uridine
  modified_base 22: mod_base = OTHER; note = 2'O-methyl-guanosine
  modified_base 23: mod_base = OTHER; note = 2'O-methyl-cytidine
  modified_base 1..2: mod_base = OTHER; note = phosphorothioate linkage
  modified_base 2..3: mod_base = OTHER; note = phosphorothioate linkage
  modified_base 21..22: mod_base = OTHER; note = phosphorothioate linkage
  modified_base 22..23: mod_base = OTHER; note = phosphorothioate linkage
  source 1..23: mol_type = other RNA
ggcgatcctttggtctgagatgc

SEQ ID NO: 397 - RNA, 23 nt, synthetic construct
  misc_feature 1..23: note = siRNA sequence name:ETXS302
  modified_base 1: mod_base = OTHER; note = 2'O-methyl-cytidine
  modified_base 2: mod_base = OTHER; note = 2' Fluoro-uridine
  modified_base 3: mod_base = OTHER; note = 2'O-methyl-cytidine
  modified_base 4: mod_base = OTHER; note = 2'O-methyl-uridine
  modified_base 5: mod_base = OTHER; note = 2'O-methyl-cytidine
  modified_base 6: mod_base = OTHER; note = 2'Fluoro-adenosine
  modified_base 7: mod_base = OTHER; note = 2'O-methyl-uridine
  modified_base 8: mod_base = OTHER; note = 2' Fluoro-uridine
  modified_base 9: mod_base = OTHER; note = 2' Fluoro-cytidine
  modified_base 10: mod_base = OTHER; note = 2'O-methyl-adenosine
  modified_base 11: mod_base = OTHER; note = 2'O-methyl-guanosine
  modified_base 12: mod_base = OTHER; note = 2'O-methyl-cytidine
  modified_base 13: mod_base = OTHER; note = 2'O-methyl-cytidine
  modified_base 14: mod_base = OTHER; note = 2' Fluoro-guanosine
  modified_base 15: mod_base = OTHER; note = 2'O-methyl-guanosine
  modified_base 16: mod_base = OTHER; note = 2'Fluoro-adenosine
  modified_base 17: mod_base = OTHER; note = 2'O-methyl-adenosine
  modified_base 18: mod_base = OTHER; note = 2'O-methyl-guanosine
  modified_base 19: mod_base = OTHER; note = 2'O-methyl-uridine
  modified_base 20: mod_base = OTHER; note = 2'O-methyl-uridine
  modified_base 21: mod_base = OTHER; note = 2'O-methyl-guanosine
  modified_base 22: mod_base = OTHER; note = 2'O-methyl-uridine
  modified_base 23: mod_base = OTHER; note = 2'O-methyl-guanosine
  modified_base 1..2: mod_base = OTHER; note = phosphorothioate linkage
  modified_base 2..3: mod_base = OTHER; note = phosphorothioate linkage
  modified_base 21..22: mod_base = OTHER; note = phosphorothioate linkage
  modified_base 22..23: mod_base = OTHER; note = phosphorothioate linkage
  source 1..23: mol_type = other RNA
ctctcattcagccggaagttgtg

SEQ ID NO: 398 - RNA, 23 nt, synthetic construct
  misc_feature 1..23: note = siRNA sequence name:ETXS304
  modified_base 1: mod_base = OTHER; note = 2'O-methyl-guanosine
  modified_base 2: mod_base = OTHER; note = 2' Fluoro-uridine
  modified_base 3: mod_base = OTHER; note = 2'O-methyl-adenosine
  modified_base 4: mod_base = OTHER; note = 2'O-methyl-cytidine
  modified_base 5: mod_base = OTHER; note = 2'O-methyl-cytidine
  modified_base 6: mod_base = OTHER; note = 2' Fluoro-cytidine
  modified_base 7: mod_base = OTHER; note = 2'O-methyl-adenosine
  modified_base 8: mod_base = OTHER; note = 2'Fluoro-adenosine
  modified_base 9: mod_base = OTHER; note = 2'Fluoro-adenosine
  modified_base 10: mod_base = OTHER; note = 2'O-methyl-adenosine
  modified_base 11: mod_base = OTHER; note = 2'O-methyl-uridine
  modified_base 12: mod_base = OTHER; note = 2'O-methyl-uridine
  modified_base 13: mod_base = OTHER; note = 2'O-methyl-cytidine
  modified_base 14: mod_base = OTHER; note = 2' Fluoro-cytidine
  modified_base 15: mod_base = OTHER; note = 2'O-methyl-uridine
  modified_base 16: mod_base = OTHER; note = 2' Fluoro-cytidine
  modified_base 17: mod_base = OTHER; note = 2'O-methyl-cytidine
  modified_base 18: mod_base = OTHER; note = 2'O-methyl-uridine
  modified_base 19: mod_base = OTHER; note = 2'O-methyl-guanosine
  modified_base 20: mod_base = OTHER; note = 2'O-methyl-adenosine
  modified_base 21: mod_base = OTHER; note = 2'O-methyl-adenosine
  modified_base 22: mod_base = OTHER; note = 2'O-methyl-guanosine
  modified_base 23: mod_base = OTHER; note = 2'O-methyl-adenosine
  modified_base 1..2: mod_base = OTHER; note = phosphorothioate linkage
  modified_base 2..3: mod_base = OTHER; note = phosphorothioate linkage
  modified_base 21..22: mod_base = OTHER; note = phosphorothioate linkage
  modified_base 22..23: mod_base = OTHER; note = phosphorothioate linkage
  source 1..23: mol_type = other RNA
gtacccaaaattcctcctgaaga

SEQ ID NO: 399 - RNA, 23 nt, synthetic construct
  misc_feature 1..23: note = siRNA sequence name:ETXS306
  modified_base 1: mod_base = OTHER; note = 2'O-methyl-cytidine
  modified_base 2: mod_base = OTHER; note = 2' Fluoro-cytidine
  modified_base 3: mod_base = OTHER; note = 2'O-methyl-uridine
  modified_base 4: mod_base = OTHER; note = 2'O-methyl-cytidine
  modified_base 5: mod_base = OTHER; note = 2'O-methyl-adenosine
  modified_base 6: mod_base = OTHER; note = 2' Fluoro-guanosine
  modified_base 7: mod_base = OTHER; note = 2'O-methyl-cytidine
  modified_base 8: mod_base = OTHER; note = 2'Fluoro-adenosine
  modified_base 9: mod_base = OTHER; note = 2'Fluoro-adenosine
  modified_base 10: mod_base = OTHER; note = 2'O-methyl-adenosine
  modified_base 11: mod_base = OTHER; note = 2'O-methyl-guanosine
  modified_base 12: mod_base = OTHER; note = 2'O-methyl-uridine
  modified_base 13: mod_base = OTHER; note = 2'O-methyl-adenosine
  modified_base 14: mod_base = OTHER; note = 2'Fluoro-adenosine
  modified_base 15: mod_base = OTHER; note = 2'O-methyl-uridine
  modified_base 16: mod_base = OTHER; note = 2'Fluoro-adenosine
  modified_base 17: mod_base = OTHER; note = 2'O-methyl-cytidine
  modified_base 18: mod_base = OTHER; note = 2'O-methyl-uridine
  modified_base 19: mod_base = OTHER; note = 2'O-methyl-cytidine
  modified_base 20: mod_base = OTHER; note = 2'O-methyl-uridine
  modified_base 21: mod_base = OTHER; note = 2'O-methyl-cytidine
  modified_base 22: mod_base = OTHER; note = 2'O-methyl-uridine
  modified_base 23: mod_base = OTHER; note = 2'O-methyl-uridine
  modified_base 1..2: mod_base = OTHER; note = phosphorothioate linkage
  modified_base 2..3: mod_base = OTHER; note = phosphorothioate linkage
  modified_base 21..22: mod_base = OTHER; note = phosphorothioate linkage
  modified_base 22..23: mod_base = OTHER; note = phosphorothioate linkage
  source 1..23: mol_type = other RNA
cctcagcaaagtaatactctctt

SEQ ID NO: 400 - RNA, 23 nt, synthetic construct
  misc_feature 1..23: note = siRNA sequence name:ETXS308
  modified_base 1: mod_base = OTHER; note = 2'O-methyl-uridine
  modified_base 2: mod_base = OTHER; note = 2' Fluoro-cytidine
  modified_base 3: mod_base = OTHER; note = 2'O-methyl-adenosine
  modified_base 4: mod_base = OTHER; note = 2'O-methyl-uridine
  modified_base 5: mod_base = OTHER; note = 2'O-methyl-uridine
  modified_base 6: mod_base = OTHER; note = 2' Fluoro-cytidine
  modified_base 7: mod_base = OTHER; note = 2'O-methyl-adenosine
  modified_base 8: mod_base = OTHER; note = 2' Fluoro-guanosine
  modified_base 9: mod_base = OTHER; note = 2' Fluoro-cytidine
  modified_base 10: mod_base = OTHER; note = 2'O-methyl-cytidine
  modified_base 11: mod_base = OTHER; note = 2'O-methyl-guanosine
  modified_base 12: mod_base = OTHER; note = 2'O-methyl-guanosine
  modified_base 13: mod_base = OTHER; note = 2'O-methyl-adenosine
  modified_base 14: mod_base = OTHER; note = 2'Fluoro-adenosine
  modified_base 15: mod_base = OTHER; note = 2'O-methyl-guanosine
  modified_base 16: mod_base = OTHER; note = 2' Fluoro-uridine
  modified_base 17: mod_base = OTHER; note = 2'O-methyl-uridine
  modified_base 18: mod_base = OTHER; note = 2'O-methyl-guanosine
  modified_base 19: mod_base = OTHER; note = 2'O-methyl-uridine
  modified_base 20: mod_base = OTHER; note = 2'O-methyl-guanosine
  modified_base 21: mod_base = OTHER; note = 2'O-methyl-guanosine
  modified_base 22: mod_base = OTHER; note = 2'O-methyl-uridine
  modified_base 23: mod_base = OTHER; note = 2'O-methyl-uridine
  modified_base 1..2: mod_base = OTHER; note = phosphorothioate linkage
  modified_base 2..3: mod_base = OTHER; note = phosphorothioate linkage
  modified_base 21..22: mod_base = OTHER; note = phosphorothioate linkage
  modified_base 22..23: mod_base = OTHER; note = phosphorothioate linkage
  source 1..23: mol_type = other RNA
tcattcagccggaagttgtggtt

SEQ ID NO: 401 - RNA, 23 nt, synthetic construct
  misc_feature 1..23: note = siRNA sequence name:ETXS310
  modified_base 1: mod_base = OTHER; note = 2'O-methyl-guanosine
  modified_base 2: mod_base = OTHER; note = 2'Fluoro-adenosine
  modified_base 3: mod_base = OTHER; note = 2'O-methyl-uridine
  modified_base 4: mod_base = OTHER; note = 2'O-methyl-guanosine
  modified_base 5: mod_base = OTHER; note = 2'O-methyl-uridine
  modified_base 6: mod_base = OTHER; note = 2' Fluoro-uridine
  modified_base 7: mod_base = OTHER; note = 2'O-methyl-adenosine
  modified_base 8: mod_base = OTHER; note = 2'Fluoro-adenosine
  modified_base 9: mod_base = OTHER; note = 2' Fluoro-guanosine
  modified_base 10: mod_base = OTHER; note = 2'O-methyl-adenosine
  modified_base 11: mod_base = OTHER; note = 2'O-methyl-cytidine
  modified_base 12: mod_base = OTHER; note = 2'O-methyl-guanosine
  modified_base 13: mod_base = OTHER; note = 2'O-methyl-cytidine
  modified_base 14: mod_base = OTHER; note = 2' Fluoro-uridine
  modified_base 15: mod_base = OTHER; note = 2'O-methyl-guanosine
  modified_base 16: mod_base = OTHER; note = 2' Fluoro-guanosine
  modified_base 17: mod_base = OTHER; note = 2'O-methyl-adenosine
  modified_base 18: mod_base = OTHER; note = 2'O-methyl-uridine
  modified_base 19: mod_base = OTHER; note = 2'O-methyl-cytidine
  modified_base 20: mod_base = OTHER; note = 2'O-methyl-cytidine
  modified_base 21: mod_base = OTHER; note = 2'O-methyl-guanosine
  modified_base 22: mod_base = OTHER; note = 2'O-methyl-guanosine
  modified_base 23: mod_base = OTHER; note = 2'O-methyl-cytidine
  modified_base 1..2: mod_base = OTHER; note = phosphorothioate linkage
  modified_base 2..3: mod_base = OTHER; note = phosphorothioate linkage
  modified_base 21..22: mod_base = OTHER; note = phosphorothioate linkage
  modified_base 22..23: mod_base = OTHER; note = phosphorothioate linkage
  source 1..23: mol_type = other RNA
gatgttaagacgctggatccggc

SEQ ID NO: 402 - RNA, 23 nt, synthetic construct
  misc_feature 1..23: note = siRNA sequence name:ETXS312
  modified_base 1: mod_base = OTHER; note = 2'O-methyl-uridine
  modified_base 2: mod_base = OTHER; note = 2' Fluoro-uridine
  modified_base 3: mod_base = OTHER; note = 2'O-methyl-guanosine
  modified_base 4: mod_base = OTHER; note = 2'O-methyl-adenosine
  modified_base 5: mod_base = OTHER; note = 2'O-methyl-adenosine
  modified_base 6: mod_base = OTHER; note = 2' Fluoro-guanosine
  modified_base 7: mod_base = OTHER; note = 2'O-methyl-uridine
  modified_base 8: mod_base = OTHER; note = 2'Fluoro-adenosine
  modified_base 9: mod_base = OTHER; note = 2' Fluoro-guanosine
  modified_base 10: mod_base = OTHER; note = 2'O-methyl-adenosine
  modified_base 11: mod_base = OTHER; note = 2'O-methyl-uridine
  modified_base 12: mod_base = OTHER; note = 2'O-methyl-guanosine
  modified_base 13: mod_base = OTHER; note = 2'O-methyl-cytidine
  modified_base 14: mod_base = OTHER; note = 2'Fluoro-adenosine
  modified_base 15: mod_base = OTHER; note = 2'O-methyl-guanosine
  modified_base 16: mod_base = OTHER; note = 2' Fluoro-uridine
  modified_base 17: mod_base = OTHER; note = 2'O-methyl-uridine
  modified_base 18: mod_base = OTHER; note = 2'O-methyl-guanosine
  modified_base 19: mod_base = OTHER; note = 2'O-methyl-adenosine
  modified_base 20: mod_base = OTHER; note = 2'O-methyl-guanosine
  modified_base 21: mod_base = OTHER; note = 2'O-methyl-adenosine
  modified_base 22: mod_base = OTHER; note = 2'O-methyl-adenosine
  modified_base 23: mod_base = OTHER; note = 2'O-methyl-uridine
  modified_base 1..2: mod_base = OTHER; note = phosphorothioate linkage
  modified_base 2..3: mod_base = OTHER; note = phosphorothioate linkage
  modified_base 21..22: mod_base = OTHER; note = phosphorothioate linkage
  modified_base 22..23: mod_base = OTHER; note = phosphorothioate linkage
  source 1..23: mol_type = other RNA
ttgaagtagatgcagttgagaat

SEQ ID NO: 403 - RNA, 23 nt, synthetic construct
  misc_feature 1..23: note = siRNA sequence name:ETXS314
  modified_base 1: mod_base = OTHER; note = 2'O-methyl-cytidine
  modified_base 2: mod_base = OTHER; note = 2' Fluoro-guanosine
  modified_base 3: mod_base = OTHER; note = 2'O-methyl-adenosine
  modified_base 4: mod_base = OTHER; note = 2'O-methyl-uridine
  modified_base 5: mod_base = OTHER; note = 2'O-methyl-cytidine
  modified_base 6: mod_base = OTHER; note = 2' Fluoro-cytidine
  modified_base 7: mod_base = OTHER; note = 2'O-methyl-uridine
  modified_base 8: mod_base = OTHER; note = 2' Fluoro-uridine
  modified_base 9: mod_base = OTHER; note = 2' Fluoro-uridine
  modified_base 10: mod_base = OTHER; note = 2'O-methyl-guanosine
  modified_base 11: mod_base = OTHER; note = 2'O-methyl-guanosine
  modified_base 12: mod_base = OTHER; note = 2'O-methyl-uridine
  modified_base 13: mod_base = OTHER; note = 2'O-methyl-cytidine
  modified_base 14: mod_base = OTHER; note = 2' Fluoro-uridine
  modified_base 15: mod_base = OTHER; note = 2'O-methyl-guanosine
  modified_base 16: mod_base = OTHER; note = 2'Fluoro-adenosine
  modified_base 17: mod_base = OTHER; note = 2'O-methyl-guanosine
  modified_base 18: mod_base = OTHER; note = 2'O-methyl-adenosine
  modified_base 19: mod_base = OTHER; note = 2'O-methyl-uridine
  modified_base 20: mod_base = OTHER; note = 2'O-methyl-guanosine
  modified_base 21: mod_base = OTHER; note = 2'O-methyl-cytidine
  modified_base 22: mod_base = OTHER; note = 2'O-methyl-cytidine
  modified_base 23: mod_base = OTHER; note = 2'O-methyl-uridine
  modified_base 1..2: mod_base = OTHER; note = phosphorothioate linkage
  modified_base 2..3: mod_base = OTHER; note = phosphorothioate linkage
  modified_base 21..22: mod_base = OTHER; note = phosphorothioate linkage
  modified_base 22..23: mod_base = OTHER; note = phosphorothioate linkage
  source 1..23: mol_type = other RNA
cgatcctttggtctgagatgcct

SEQ ID NO: 404 - RNA, 23 nt, synthetic construct
  misc_feature 1..23: note = siRNA sequence name:ETXS316
  modified_base 1: mod_base = OTHER; note = 2'O-methyl-guanosine
  modified_base 2: mod_base = OTHER; note = 2'Fluoro-adenosine
  modified_base 3: mod_base = OTHER; note = 2'O-methyl-guanosine
  modified_base 4: mod_base = OTHER; note = 2'O-methyl-uridine
  modified_base 5: mod_base = OTHER; note = 2'O-methyl-uridine
  modified_base 6: mod_base = OTHER; note = 2' Fluoro-cytidine
  modified_base 7: mod_base = OTHER; note = 2'O-methyl-uridine
  modified_base 8: mod_base = OTHER; note = 2' Fluoro-guanosine
  modified_base 9: mod_base = OTHER; note = 2' Fluoro-uridine
  modified_base 10: mod_base = OTHER; note = 2'O-methyl-uridine
  modified_base 11: mod_base = OTHER; note = 2'O-methyl-uridine
  modified_base 12: mod_base = OTHER; note = 2'O-methyl-guanosine
  modified_base 13: mod_base = OTHER; note = 2'O-methyl-uridine
  modified_base 14: mod_base = OTHER; note = 2' Fluoro-cytidine
  modified_base 15: mod_base = OTHER; note = 2'O-methyl-adenosine
  modified_base 16: mod_base = OTHER; note = 2' Fluoro-uridine
  modified_base 17: mod_base = OTHER; note = 2'O-methyl-guanosine
  modified_base 18: mod_base = OTHER; note = 2'O-methyl-cytidine
  modified_base 19: mod_base = OTHER; note = 2'O-methyl-uridine
  modified_base 20: mod_base = OTHER; note = 2'O-methyl-uridine
  modified_base 21: mod_base = OTHER; note = 2'O-methyl-uridine
  modified_base 22: mod_base = OTHER; note = 2'O-methyl-uridine
  modified_base 23: mod_base = OTHER; note = 2'O-methyl-uridine
  modified_base 1..2: mod_base = OTHER; note = phosphorothioate linkage
  modified_base 2..3: mod_base = OTHER; note = phosphorothioate linkage
  modified_base 21..22: mod_base = OTHER; note = phosphorothioate linkage
  modified_base 22..23: mod_base = OTHER; note = phosphorothioate linkage
  source 1..23: mol_type = other RNA
gagttctgtttgtcatgcttttt

SEQ ID NO: 405 - RNA, 23 nt, synthetic construct
  misc_feature 1..23: note = siRNA sequence name:ETXS318
  modified_base 1: mod_base = OTHER; note = 2'O-methyl-guanosine
  modified_base 2: mod_base = OTHER; note = 2' Fluoro-cytidine
  modified_base 3: mod_base = OTHER; note = 2'O-methyl-adenosine
  modified_base 4: mod_base = OTHER; note = 2'O-methyl-guanosine
  modified_base 5: mod_base = OTHER; note = 2'O-methyl-guanosine
  modified_base 6: mod_base = OTHER; note = 2' Fluoro-guanosine
  modified_base 7: mod_base = OTHER; note = 2'O-methyl-uridine
  modified_base 8: mod_base = OTHER; note = 2' Fluoro-cytidine
  modified_base 9: mod_base = OTHER; note = 2' Fluoro-uridine
  modified_base 10: mod_base = OTHER; note = 2'O-methyl-adenosine
  modified_base 11: mod_base = OTHER; note = 2'O-methyl-uridine
  modified_base 12: mod_base = OTHER; note = 2'O-methyl-adenosine
  modified_base 13: mod_base = OTHER; note = 2'O-methyl-uridine
  modified_base 14: mod_base = OTHER; note = 2' Fluoro-uridine
  modified_base 15: mod_base = OTHER; note = 2'O-methyl-cytidine
  modified_base 16: mod_base = OTHER; note = 2' Fluoro-uridine
  modified_base 17: mod_base = OTHER; note = 2'O-methyl-cytidine
  modified_base 18: mod_base = OTHER; note = 2'O-methyl-cytidine
  modified_base 19: mod_base = OTHER; note = 2'O-methyl-adenosine
  modified_base 20: mod_base = OTHER; note = 2'O-methyl-guanosine
  modified_base 21: mod_base = OTHER; note = 2'O-methyl-adenosine
  modified_base 22: mod_base = OTHER; note = 2'O-methyl-guanosine
  modified_base 23: mod_base = OTHER; note = 2'O-methyl-cytidine
  modified_base 1..2: mod_base = OTHER; note = phosphorothioate linkage
  modified_base 2..3: mod_base = OTHER; note = phosphorothioate linkage
  modified_base 21..22: mod_base = OTHER; note = phosphorothioate linkage
  modified_base 22..23: mod_base = OTHER; note = phosphorothioate linkage
  source 1..23: mol_type = other RNA
gcagggtctatattctccagagc

SEQ ID NO: 406 - RNA, 23 nt, synthetic construct
  misc_feature 1..23: note = siRNA sequence name:ETXS320
  modified_base 1: mod_base = OTHER; note = 2'O-methyl-cytidine
  modified_base 2: mod_base = OTHER; note = 2' Fluoro-uridine
  modified_base 3: mod_base = OTHER; note = 2'O-methyl-cytidine
  modified_base 4: mod_base = OTHER; note = 2'O-methyl-adenosine
  modified_base 5: mod_base = OTHER; note = 2'O-methyl-guanosine
  modified_base 6: mod_base = OTHER; note = 2' Fluoro-cytidine
  modified_base 7: mod_base = OTHER; note = 2'O-methyl-adenosine
  modified_base 8: mod_base = OTHER; note = 2'Fluoro-adenosine
  modified_base 9: mod_base = OTHER; note = 2'Fluoro-adenosine
  modified_base 10: mod_base = OTHER; note = 2'O-methyl-guanosine
  modified_base 11: mod_base = OTHER; note = 2'O-methyl-uridine
  modified_base 12: mod_base = OTHER; note = 2'O-methyl-adenosine
  modified_base 13: mod_base = OTHER; note = 2'O-methyl-adenosine
  modified_base 14: mod_base = OTHER; note = 2' Fluoro-uridine
  modified_base 15: mod_base = OTHER; note = 2'O-methyl-adenosine
  modified_base 16: mod_base = OTHER; note = 2' Fluoro-cytidine
  modified_base 17: mod_base = OTHER; note = 2'O-methyl-uridine
  modified_base 18: mod_base = OTHER; note = 2'O-methyl-cytidine
  modified_base 19: mod_base = OTHER; note = 2'O-methyl-uridine
  modified_base 20: mod_base = OTHER; note = 2'O-methyl-cytidine
  modified_base 21: mod_base = OTHER; note = 2'O-methyl-uridine
  modified_base 22: mod_base = OTHER; note = 2'O-methyl-uridine
  modified_base 23: mod_base = OTHER; note = 2'O-methyl-adenosine
  modified_base 1..2: mod_base = OTHER; note = phosphorothioate linkage
  modified_base 2..3: mod_base = OTHER; note = phosphorothioate linkage
  modified_base 21..22: mod_base = OTHER; note = phosphorothioate linkage
  modified_base 22..23: mod_base = OTHER; note = phosphorothioate linkage
  source 1..23: mol_type = other RNA
ctcagcaaagtaatactctctta

SEQ ID NO: 407 - RNA, 23 nt, synthetic construct
  misc_feature 1..23: note = siRNA sequence name:ETXS322
  modified_base 1: mod_base = OTHER; note = 2'O-methyl-adenosine
  modified_base 2: mod_base = OTHER; note = 2' Fluoro-cytidine
  modified_base 3: mod_base = OTHER; note = 2'O-methyl-cytidine
  modified_base 4: mod_base = OTHER; note = 2'O-methyl-uridine
  modified_base 5: mod_base = OTHER; note = 2'O-methyl-cytidine
  modified_base 6: mod_base = OTHER; note = 2' Fluoro-uridine
  modified_base 7: mod_base = OTHER; note = 2'O-methyl-cytidine
  modified_base 8: mod_base = OTHER; note = 2' Fluoro-uridine
  modified_base 9: mod_base = OTHER; note = 2' Fluoro-cytidine
  modified_base 10: mod_base = OTHER; note = 2'O-methyl-uridine
  modified_base 11: mod_base = OTHER; note = 2'O-methyl-cytidine
  modified_base 12: mod_base = OTHER; note = 2'O-methyl-adenosine
  modified_base 13: mod_base = OTHER; note = 2'O-methyl-uridine
  modified_base 14: mod_base = OTHER; note = 2' Fluoro-uridine
  modified_base 15: mod_base = OTHER; note = 2'O-methyl-cytidine
  modified_base 16: mod_base = OTHER; note = 2'Fluoro-adenosine
  modified_base 17: mod_base = OTHER; note = 2'O-methyl-guanosine
  modified_base 18: mod_base = OTHER; note = 2'O-methyl-cytidine
  modified_base 19: mod_base = OTHER; note = 2'O-methyl-cytidine
  modified_base 20: mod_base = OTHER; note = 2'O-methyl-guanosine
  modified_base 21: mod_base = OTHER; note = 2'O-methyl-guanosine
  modified_base 22: mod_base = OTHER; note = 2'O-methyl-adenosine
  modified_base 23: mod_base = OTHER; note = 2'O-methyl-adenosine
  modified_base 1..2: mod_base = OTHER; note = phosphorothioate linkage
  modified_base 2..3: mod_base = OTHER; note = phosphorothioate linkage
  modified_base 21..22: mod_base = OTHER; note = phosphorothioate linkage
  modified_base 22..23: mod_base = OTHER; note = phosphorothioate linkage
  source 1..23: mol_type = other RNA
acctctctctcattcagccggaa

SEQ ID NO: 408 - RNA, 23 nt, synthetic construct
  misc_feature 1..23: note = siRNA sequence name:ETXS324
  modified_base 1: mod_base = OTHER; note = 2'O-methyl-cytidine
  modified_base 2: mod_base = OTHER; note = 2' Fluoro-uridine
  modified_base 3: mod_base = OTHER; note = 2'O-methyl-guanosine
  modified_base 4: mod_base = OTHER; note = 2'O-methyl-guanosine
  modified_base 5: mod_base = OTHER; note = 2'O-methyl-guanosine
  modified_base 6: mod_base = OTHER; note = 2'Fluoro-adenosine
  modified_base 7: mod_base = OTHER; note = 2'O-methyl-adenosine
  modified_base 8: mod_base = OTHER; note = 2' Fluoro-uridine
  modified_base 9: mod_base = OTHER; note = 2' Fluoro-uridine
  modified_base 10: mod_base = OTHER; note = 2'O-methyl-uridine
  modified_base 11: mod_base = OTHER; note = 2'O-methyl-adenosine
  modified_base 12: mod_base = OTHER; note = 2'O-methyl-uridine
  modified_base 13: mod_base = OTHER; note = 2'O-methyl-uridine
  modified_base 14: mod_base = OTHER; note = 2' Fluoro-cytidine
  modified_base 15: mod_base = OTHER; note = 2'O-methyl-adenosine
  modified_base 16: mod_base = OTHER; note = 2' Fluoro-cytidine
  modified_base 17: mod_base = OTHER; note = 2'O-methyl-cytidine
  modified_base 18: mod_base = OTHER; note = 2'O-methyl-cytidine
  modified_base 19: mod_base = OTHER; note = 2'O-methyl-adenosine
  modified_base 20: mod_base = OTHER; note = 2'O-methyl-guanosine
  modified_base 21: mod_base = OTHER; note = 2'O-methyl-guanosine
  modified_base 22: mod_base = OTHER; note = 2'O-methyl-adenosine
  modified_base 23: mod_base = OTHER; note = 2'O-methyl-uridine
  modified_base 1..2: mod_base = OTHER; note = phosphorothioate linkage
  modified_base 2..3: mod_base = OTHER; note = phosphorothioate linkage
  modified_base 21..22: mod_base = OTHER; note = phosphorothioate linkage
  modified_base 22..23: mod_base = OTHER; note = phosphorothioate linkage
  source 1..23: mol_type = other RNA
ctgggaatttattcacccaggat

SEQ ID NO: 409 - RNA, 23 nt, synthetic construct
  misc_feature 1..23: note = siRNA sequence name:ETXS326
  modified_base 1: mod_base = OTHER; note = 2'O-methyl-guanosine
  modified_base 2: mod_base = OTHER; note = 2' Fluoro-uridine
  modified_base 3: mod_base = OTHER; note = 2'O-methyl-cytidine
  modified_base 4: mod_base = OTHER; note = 2'O-methyl-uridine
  modified_base 5: mod_base = OTHER; note = 2'O-methyl-cytidine
  modified_base 6: mod_base = OTHER; note = 2' Fluoro-uridine
  modified_base 7: mod_base = OTHER; note = 2'O-methyl-cytidine
  modified_base 8: mod_base = OTHER; note = 2' Fluoro-cytidine
  modified_base 9: mod_base = OTHER; note = 2' Fluoro-cytidine
  modified_base 10: mod_base = OTHER; note = 2'O-methyl-uridine
  modified_base 11: mod_base = OTHER; note = 2'O-methyl-uridine
  modified_base 12: mod_base = OTHER; note = 2'O-methyl-cytidine
  modified_base 13: mod_base = OTHER; note = 2'O-methyl-adenosine
  modified_base 14: mod_base = OTHER; note = 2' Fluoro-guanosine
  modified_base 15: mod_base = OTHER; note = 2'O-methyl-adenosine
  modified_base 16: mod_base = OTHER; note = 2' Fluoro-cytidine
  modified_base 17: mod_base = OTHER; note = 2'O-methyl-cytidine
  modified_base 18: mod_base = OTHER; note = 2'O-methyl-uridine
  modified_base 19: mod_base = OTHER; note = 2'O-methyl-adenosine
  modified_base 20: mod_base = OTHER; note = 2'O-methyl-adenosine
  modified_base 21: mod_base = OTHER; note = 2'O-methyl-guanosine
  modified_base 22: mod_base = OTHER; note = 2'O-methyl-guanosine
  modified_base 23: mod_base = OTHER; note = 2'O-methyl-adenosine
  modified_base 1..2: mod_base = OTHER; note = phosphorothioate linkage
  modified_base 2..3: mod_base = OTHER; note = phosphorothioate linkage
  modified_base 21..22: mod_base = OTHER; note = phosphorothioate linkage
  modified_base 22..23: mod_base = OTHER; note = phosphorothioate linkage
  source 1..23: mol_type = other RNA
gtctctcccttcagacctaagga

SEQ ID NO: 410 - RNA, 23 nt, synthetic construct
  misc_feature 1..23: note = siRNA sequence name:ETXS328
  modified_base 1: mod_base = OTHER; note = 2'O-methyl-uridine
  modified_base 2: mod_base = OTHER; note = 2' Fluoro-cytidine
  modified_base 3: mod_base = OTHER; note = 2'O-methyl-uridine
  modified_base 4: mod_base = OTHER; note = 2'O-methyl-cytidine
  modified_base 5: mod_base = OTHER; note = 2'O-methyl-uridine
  modified_base 6: mod_base = OTHER; note = 2' Fluoro-cytidine
  modified_base 7: mod_base = OTHER; note = 2'O-methyl-uridine
  modified_base 8: mod_base = OTHER; note = 2' Fluoro-cytidine
  modified_base 9: mod_base = OTHER; note = 2'Fluoro-adenosine
  modified_base 10: mod_base = OTHER; note = 2'O-methyl-uridine
  modified_base 11: mod_base = OTHER; note = 2'O-methyl-uridine
  modified_base 12: mod_base = OTHER; note = 2'O-methyl-cytidine
  modified_base 13: mod_base = OTHER; note = 2'O-methyl-adenosine
  modified_base 14: mod_base = OTHER; note = 2' Fluoro-guanosine
  modified_base 15: mod_base = OTHER; note = 2'O-methyl-cytidine
  modified_base 16: mod_base = OTHER; note = 2' Fluoro-cytidine
  modified_base 17: mod_base = OTHER; note = 2'O-methyl-guanosine
  modified_base 18: mod_base = OTHER; note = 2'O-methyl-guanosine
  modified_base 19: mod_base = OTHER; note = 2'O-methyl-adenosine
  modified_base 20: mod_base = OTHER; note = 2'O-methyl-adenosine
  modified_base 21: mod_base = OTHER; note = 2'O-methyl-guanosine
  modified_base 22: mod_base = OTHER; note = 2'O-methyl-uridine
  modified_base 23: mod_base = OTHER; note = 2'O-methyl-uridine
  modified_base 1..2: mod_base = OTHER; note = phosphorothioate linkage
  modified_base 2..3: mod_base = OTHER; note = phosphorothioate linkage
  modified_base 21..22: mod_base = OTHER; note = phosphorothioate linkage
  modified_base 22..23: mod_base = OTHER; note = phosphorothioate linkage
  source 1..23: mol_type = other RNA
tctctctcattcagccggaagtt

SEQ ID NO: 411 - RNA, 23 nt, synthetic construct
  misc_feature 1..23: note = siRNA sequence name:ETXS330
  modified_base 1: mod_base = OTHER; note = 2'O-methyl-guanosine
  modified_base 2: mod_base = OTHER; note = 2' Fluoro-uridine
  modified_base 3: mod_base = OTHER; note = 2'O-methyl-cytidine
  modified_base 4: mod_base = OTHER; note = 2'O-methyl-adenosine
  modified_base 5: mod_base = OTHER; note = 2'O-methyl-uridine
  modified_base 6: mod_base = OTHER; note = 2' Fluoro-uridine
  modified_base 7: mod_base = OTHER; note = 2'O-methyl-uridine
  modified_base 8: mod_base = OTHER; note = 2' Fluoro-cytidine
  modified_base 9: mod_base = OTHER; note = 2' Fluoro-cytidine
  modified_base 10: mod_base = OTHER; note = 2'O-methyl-adenosine
  modified_base 11: mod_base = OTHER; note = 2'O-methyl-cytidine
  modified_base 12: mod_base = OTHER; note = 2'O-methyl-uridine
  modified_base 13: mod_base = OTHER; note = 2'O-methyl-guanosine
  modified_base 14: mod_base = OTHER; note = 2' Fluoro-guanosine
  modified_base 15: mod_base = OTHER; note = 2'O-methyl-guanosine
  modified_base 16: mod_base = OTHER; note = 2'Fluoro-adenosine
  modified_base 17: mod_base = OTHER; note = 2'O-methyl-adenosine
  modified_base 18: mod_base = OTHER; note = 2'O-methyl-uridine
  modified_base 19: mod_base = OTHER; note = 2'O-methyl-uridine
  modified_base 20: mod_base = OTHER; note = 2'O-methyl-uridine
  modified_base 21: mod_base = OTHER; note = 2'O-methyl-adenosine
  modified_base 22: mod_base = OTHER; note = 2'O-methyl-uridine
  modified_base 23: mod_base = OTHER; note = 2'O-methyl-uridine
  modified_base 1..2: mod_base = OTHER; note = phosphorothioate linkage
  modified_base 2..3: mod_base = OTHER; note = phosphorothioate linkage
  modified_base 21..22: mod_base = OTHER; note = phosphorothioate linkage
  modified_base 22..23: mod_base = OTHER; note = phosphorothioate linkage
  source 1..23: mol_type = other RNA
gtcatttccactgggaatttatt

SEQ ID NO: 412 - RNA, 23 nt, synthetic construct
  misc_feature 1..23: note = siRNA sequence name:ETXS332
  modified_base 1: mod_base = OTHER; note = 2'O-methyl-adenosine
  modified_base 2: mod_base = OTHER; note = 2' Fluoro-uridine
  modified_base 3: mod_base = OTHER; note = 2'O-methyl-uridine
  modified_base 4: mod_base = OTHER; note = 2'O-methyl-cytidine
  modified_base 5: mod_base = OTHER; note = 2'O-methyl-adenosine
  modified_base 6: mod_base = OTHER; note = 2' Fluoro-guanosine
  modified_base 7: mod_base = OTHER; note = 2'O-methyl-cytidine
  modified_base 8: mod_base = OTHER; note = 2' Fluoro-cytidine
  modified_base 9: mod_base = OTHER; note = 2' Fluoro-guanosine
  modified_base 10: mod_base = OTHER; note = 2'O-methyl-guanosine
  modified_base 11: mod_base = OTHER; note = 2'O-methyl-adenosine
  modified_base 12: mod_base = OTHER; note = 2'O-methyl-adenosine
  modified_base 13: mod_base = OTHER; note = 2'O-methyl-guanosine
  modified_base 14: mod_base = OTHER; note = 2' Fluoro-uridine
  modified_base 15: mod_base = OTHER; note = 2'O-methyl-uridine
  modified_base 16: mod_base = OTHER; note = 2' Fluoro-guanosine
  modified_base 17: mod_base = OTHER; note = 2'O-methyl-uridine
  modified_base 18: mod_base = OTHER; note = 2'O-methyl-guanosine
  modified_base 19: mod_base = OTHER; note = 2'O-methyl-guanosine
  modified_base 20: mod_base = OTHER; note = 2'O-methyl-uridine
  modified_base 21: mod_base = OTHER; note = 2'O-methyl-uridine
  modified_base 22: mod_base = OTHER; note = 2'O-methyl-guanosine
  modified_base 23: mod_base = OTHER; note = 2'O-methyl-uridine
  modified_base 1..2: mod_base = OTHER; note = phosphorothioate linkage
  modified_base 2..3: mod_base = OTHER; note = phosphorothioate linkage
  modified_base 21..22: mod_base = OTHER; note = phosphorothioate linkage
  modified_base 22..23: mod_base = OTHER; note = phosphorothioate linkage
  source 1..23: mol_type = other RNA
attcagccggaagttgtggttgt

SEQ ID NO: 413 - RNA, 23 nt, synthetic construct
  misc_feature 1..23: note = siRNA sequence name:ETXS334
  modified_base 1: mod_base = OTHER; note = 2'O-methyl-guanosine
  modified_base 2: mod_base = OTHER; note = 2' Fluoro-uridine
  modified_base 3: mod_base = OTHER; note = 2'O-methyl-adenosine
  modified_base 4: mod_base = OTHER; note = 2'O-methyl-guanosine
  modified_base 5: mod_base = OTHER; note = 2'O-methyl-cytidine
  modified_base 6: mod_base = OTHER; note = 2'Fluoro-adenosine
  modified_base 7: mod_base = OTHER; note = 2'O-methyl-guanosine
  modified_base 8: mod_base = OTHER; note = 2' Fluoro-guanosine
  modified_base 9: mod_base = OTHER; note = 2' Fluoro-guanosine
  modified_base 10: mod_base = OTHER; note = 2'O-methyl-uridine
  modified_base 11: mod_base = OTHER; note = 2'O-methyl-cytidine
  modified_base 12: mod_base = OTHER; note = 2'O-methyl-uridine
  modified_base 13: mod_base = OTHER; note = 2'O-methyl-adenosine
  modified_base 14: mod_base = OTHER; note = 2' Fluoro-uridine
  modified_base 15: mod_base = OTHER; note = 2'O-methyl-adenosine
  modified_base 16: mod_base = OTHER; note = 2' Fluoro-uridine
  modified_base 17: mod_base = OTHER; note = 2'O-methyl-uridine
  modified_base 18: mod_base = OTHER; note = 2'O-methyl-cytidine
  modified_base 19: mod_base = OTHER; note = 2'O-methyl-uridine
  modified_base 20: mod_base = OTHER; note = 2'O-methyl-cytidine
  modified_base 21: mod_base = OTHER; note = 2'O-methyl-cytidine
  modified_base 22: mod_base = OTHER; note = 2'O-methyl-adenosine
  modified_base 23: mod_base = OTHER; note = 2'O-methyl-guanosine
  modified_base 1..2: mod_base = OTHER; note = phosphorothioate linkage
  modified_base 2..3: mod_base = OTHER; note = phosphorothioate linkage
  modified_base 21..22: mod_base = OTHER; note = phosphorothioate linkage
  modified_base 22..23: mod_base = OTHER; note = phosphorothioate linkage
  source 1..23: mol_type = other RNA
gtagcagggtctatattctccag

SEQ ID NO: 414 - RNA, 23 nt, synthetic construct
  misc_feature 1..23: note = siRNA sequence name:ETXS336
  modified_base 1: mod_base = OTHER; note = 2'O-methyl-guanosine
  modified_base 2: mod_base = OTHER; note = 2' Fluoro-guanosine
  modified_base 3: mod_base = OTHER; note = 2'O-methyl-uridine
  modified_base 4: mod_base = OTHER; note = 2'O-methyl-guanosine
  modified_base 5: mod_base = OTHER; note = 2'O-methyl-cytidine
  modified_base 6: mod_base = OTHER; note = 2' Fluoro-uridine
  modified_base 7: mod_base = OTHER; note = 2'O-methyl-uridine
  modified_base 8: mod_base = OTHER; note = 2' Fluoro-guanosine
  modified_base 9: mod_base = OTHER; note = 2'Fluoro-adenosine
  modified_base 10: mod_base = OTHER; note = 2'O-methyl-adenosine
  modified_base 11: mod_base = OTHER; note = 2'O-methyl-cytidine
  modified_base 12: mod_base = OTHER; note = 2'O-methyl-adenosine
  modified_base 13: mod_base = OTHER; note = 2'O-methyl-guanosine
  modified_base 14: mod_base = OTHER; note = 2' Fluoro-guanosine
  modified_base 15: mod_base = OTHER; note = 2'O-methyl-uridine
  modified_base 16: mod_base = OTHER; note = 2' Fluoro-cytidine
  modified_base 17: mod_base = OTHER; note = 2'O-methyl-guanosine
  modified_base 18: mod_base = OTHER; note = 2'O-methyl-adenosine
  modified_base 19: mod_base = OTHER; note = 2'O-methyl-uridine
  modified_base 20: mod_base = OTHER; note = 2'O-methyl-guanosine
  modified_base 21: mod_base = OTHER; note = 2'O-methyl-guanosine
  modified_base 22: mod_base = OTHER; note = 2'O-methyl-cytidine
  modified_base 23: mod_base = OTHER; note = 2'O-methyl-guanosine
  modified_base 1..2: mod_base = OTHER; note = phosphorothioate linkage
  modified_base 2..3: mod_base = OTHER; note = phosphorothioate linkage
  modified_base 21..22: mod_base = OTHER; note = phosphorothioate linkage
  modified_base 22..23: mod_base = OTHER; note = phosphorothioate linkage
  source 1..23: mol_type = other RNA
ggtgcttgaacaggtcgatggcg

SEQ ID NO: 415 - RNA, 23 nt, synthetic construct
  misc_feature 1..23: note = siRNA sequence name:ETXS338
  modified_base 1: mod_base = OTHER; note = 2'O-methyl-uridine
  modified_base 2: mod_base = OTHER; note = 2' Fluoro-guanosine
  modified_base 3: mod_base = OTHER; note = 2'O-methyl-adenosine
  modified_base 4: mod_base = OTHER; note = 2'O-methyl-adenosine
  modified_base 5: mod_base = OTHER; note = 2'O-methyl-guanosine
  modified_base 6: mod_base = OTHER; note = 2' Fluoro-uridine
  modified_base 7: mod_base = OTHER; note = 2'O-methyl-adenosine
  modified_base 8: mod_base = OTHER; note = 2' Fluoro-guanosine
  modified_base 9: mod_base = OTHER; note = 2'Fluoro-adenosine
  modified_base 10: mod_base = OTHER; note = 2'O-methyl-uridine
  modified_base 11: mod_base = OTHER; note = 2'O-methyl-guanosine
  modified_base 12: mod_base = OTHER; note = 2'O-methyl-cytidine
  modified_base 13: mod_base = OTHER; note = 2'O-methyl-adenosine
  modified_base 14: mod_base = OTHER; note = 2' Fluoro-guanosine
  modified_base 15: mod_base = OTHER; note = 2'O-methyl-uridine
  modified_base 16: mod_base = OTHER; note = 2' Fluoro-uridine
  modified_base 17: mod_base = OTHER; note = 2'O-methyl-guanosine
  modified_base 18: mod_base = OTHER; note = 2'O-methyl-adenosine
  modified_base 19: mod_base = OTHER; note = 2'O-methyl-guanosine
  modified_base 20: mod_base = OTHER; note = 2'O-methyl-adenosine
  modified_base 21: mod_base = OTHER; note = 2'O-methyl-adenosine
  modified_base 22: mod_base = OTHER; note = 2'O-methyl-uridine
  modified_base 23: mod_base = OTHER; note = 2'O-methyl-cytidine
  modified_base 1..2: mod_base = OTHER; note = phosphorothioate linkage
  modified_base 2..3: mod_base = OTHER; note = phosphorothioate linkage
  modified_base 21..22: mod_base = OTHER; note = phosphorothioate linkage
  modified_base 22..23: mod_base = OTHER; note = phosphorothioate linkage
  source 1..23: mol_type = other RNA
tgaagtagatgcagttgagaatc

SEQ ID NO: 416 - RNA, 23 nt, synthetic construct
  misc_feature 1..23: note = siRNA sequence name:ETXS340
  modified_base 1: mod_base = OTHER; note = 2'O-methyl-uridine
  modified_base 2: mod_base = OTHER; note = 2' Fluoro-guanosine
  modified_base 3: mod_base = OTHER; note = 2'O-methyl-adenosine
  modified_base 4: mod_base = OTHER; note = 2'O-methyl-guanosine
  modified_base 5: mod_base = OTHER; note = 2'O-methyl-guanosine
  modified_base 6: mod_base = OTHER; note = 2'Fluoro-adenosine
  modified_base 7: mod_base = OTHER; note = 2'O-methyl-uridine
  modified_base 8: mod_base = OTHER; note = 2' Fluoro-guanosine
  modified_base 9: mod_base = OTHER; note = 2' Fluoro-uridine
  modified_base 10: mod_base = OTHER; note = 2'O-methyl-uridine
  modified_base 11: mod_base = OTHER; note = 2'O-methyl-adenosine
  modified_base 12: mod_base = OTHER; note = 2'O-methyl-adenosine
  modified_base 13: mod_base = OTHER; note = 2'O-methyl-guanosine
  modified_base 14: mod_base = OTHER; note = 2'Fluoro-adenosine
  modified_base 15: mod_base = OTHER; note = 2'O-methyl-cytidine
  modified_base 16: mod_base = OTHER; note = 2' Fluoro-guanosine
  modified_base 17: mod_base = OTHER; note = 2'O-methyl-cytidine
  modified_base 18: mod_base = OTHER; note = 2'O-methyl-uridine
  modified_base 19: mod_base = OTHER; note = 2'O-methyl-guanosine
  modified_base 20: mod_base = OTHER; note = 2'O-methyl-guanosine
  modified_base 21: mod_base = OTHER; note = 2'O-methyl-adenosine
  modified_base 22: mod_base = OTHER; note = 2'O-methyl-uridine
  modified_base 23: mod_base = OTHER; note = 2'O-methyl-cytidine
  modified_base 1..2: mod_base = OTHER; note = phosphorothioate linkage
  modified_base 2..3: mod_base = OTHER; note = phosphorothioate linkage
  modified_base 21..22: mod_base = OTHER; note = phosphorothioate linkage
  modified_base 22..23: mod_base = OTHER; note = phosphorothioate linkage
  source 1..23: mol_type = other RNA
tgaggatgttaagacgctggatc

SEQ ID NO: 417 - RNA, 23 nt, synthetic construct
  misc_feature 1..23: note = siRNA sequence name:ETXS342
  modified_base 1: mod_base = OTHER; note = 2'O-methyl-adenosine
  modified_base 2: mod_base = OTHER; note = 2' Fluoro-uridine
  modified_base 3: mod_base = OTHER; note = 2'O-methyl-cytidine
  modified_base 4: mod_base = OTHER; note = 2'O-methyl-cytidine
  modified_base 5: mod_base = OTHER; note = 2'O-methyl-uridine
  modified_base 6: mod_base = OTHER; note = 2' Fluoro-uridine
  modified_base 7: mod_base = OTHER; note = 2'O-methyl-uridine
  modified_base 8: mod_base = OTHER; note = 2' Fluoro-guanosine
  modified_base 9: mod_base = OTHER; note = 2' Fluoro-guanosine
  modified_base 10: mod_base = OTHER; note = 2'O-methyl-uridine
  modified_base 11: mod_base = OTHER; note = 2'O-methyl-cytidine
  modified_base 12: mod_base = OTHER; note = 2'O-methyl-uridine
  modified_base 13: mod_base = OTHER; note = 2'O-methyl-guanosine
  modified_base 14: mod_base = OTHER; note = 2'Fluoro-adenosine
  modified_base 15: mod_base = OTHER; note = 2'O-methyl-guanosine
  modified_base 16: mod_base = OTHER; note = 2'Fluoro-adenosine
  modified_base 17: mod_base = OTHER; note = 2'O-methyl-uridine
  modified_base 18: mod_base = OTHER; note = 2'O-methyl-guanosine
  modified_base 19: mod_base = OTHER; note = 2'O-methyl-cytidine
  modified_base 20: mod_base = OTHER; note = 2'O-methyl-cytidine
  modified_base 21: mod_base = OTHER; note = 2'O-methyl-uridine
  modified_base 22: mod_base = OTHER; note = 2'O-methyl-guanosine
  modified_base 23: mod_base = OTHER; note = 2'O-methyl-cytidine
  modified_base 1..2: mod_base = OTHER; note = phosphorothioate linkage
  modified_base 2..3: mod_base = OTHER; note = phosphorothioate linkage
  modified_base 21..22: mod_base = OTHER; note = phosphorothioate linkage
  modified_base 22..23: mod_base = OTHER; note = phosphorothioate linkage
  source 1..23: mol_type = other RNA
atcctttggtctgagatgcctgc

SEQ ID NO: 418 - RNA, 23 nt, synthetic construct
  misc_feature 1..23: note = siRNA sequence name:ETXS344
  modified_base 1: mod_base = OTHER; note = 2'O-methyl-cytidine
  modified_base 2: mod_base = OTHER; note = 2' Fluoro-guanosine
  modified_base 3: mod_base = OTHER; note = 2'O-methyl-guanosine
  modified_base 4: mod_base = OTHER; note = 2'O-methyl-adenosine
  modified_base 5: mod_base = OTHER; note = 2'O-methyl-cytidine
  modified_base 6: mod_base = OTHER; note = 2' Fluoro-uridine
  modified_base 7: mod_base = OTHER; note = 2'O-methyl-uridine
  modified_base 8: mod_base = OTHER; note = 2' Fluoro-guanosine
  modified_base 9: mod_base = OTHER; note = 2' Fluoro-guanosine
  modified_base 10: mod_base = OTHER; note = 2'O-methyl-guanosine
  modified_base 11: mod_base = OTHER; note = 2'O-methyl-uridine
  modified_base 12: mod_base = OTHER; note = 2'O-methyl-guanosine
  modified_base 13: mod_base = OTHER; note = 2'O-methyl-guanosine
  modified_base 14: mod_base = OTHER; note = 2'Fluoro-adenosine
  modified_base 15: mod_base = OTHER; note = 2'O-methyl-cytidine
  modified_base 16: mod_base = OTHER; note = 2'Fluoro-adenosine
  modified_base 17: mod_base = OTHER; note = 2'O-methyl-guanosine
  modified_base 18: mod_base = OTHER; note = 2'O-methyl-cytidine
  modified_base 19: mod_base = OTHER; note = 2'O-methyl-guanosine
  modified_base 20: mod_base = OTHER; note = 2'O-methyl-guanosine
  modified_base 21: mod_base = OTHER; note = 2'O-methyl-cytidine
  modified_base 22: mod_base = OTHER; note = 2'O-methyl-adenosine
  modified_base 23: mod_base = OTHER; note = 2'O-methyl-uridine
  modified_base 1..2: mod_base = OTHER; note = phosphorothioate linkage
  modified_base 2..3: mod_base = OTHER; note = phosphorothioate linkage
  modified_base 21..22: mod_base = OTHER; note = phosphorothioate linkage
  modified_base 22..23: mod_base = OTHER; note = phosphorothioate linkage
  source 1..23: mol_type = other RNA
cggacttgggtggacagcggcat

SEQ ID NO: 419 - RNA, 23 nt, synthetic construct
  misc_feature 1..23: note = siRNA sequence name:ETXS346
  modified_base 1: mod_base = OTHER; note = 2'O-methyl-uridine
  modified_base 2: mod_base = OTHER; note = 2' Fluoro-uridine
  modified_base 3: mod_base = OTHER; note = 2'O-methyl-cytidine
  modified_base 4: mod_base = OTHER; note = 2'O-methyl-uridine
  modified_base 5: mod_base = OTHER; note = 2'O-methyl-cytidine
  modified_base 6: mod_base = OTHER; note = 2' Fluoro-guanosine
  modified_base 7: mod_base = OTHER; note = 2'O-methyl-adenosine
  modified_base 8: mod_base = OTHER; note = 2' Fluoro-guanosine
  modified_base 9: mod_base = OTHER; note = 2' Fluoro-uridine
  modified_base 10: mod_base = OTHER; note = 2'O-methyl-uridine
  modified_base 11: mod_base = OTHER; note = 2'O-methyl-cytidine
  modified_base 12: mod_base = OTHER; note = 2'O-methyl-uridine
  modified_base 13: mod_base = OTHER; note = 2'O-methyl-guanosine
  modified_base 14: mod_base = OTHER; note = 2' Fluoro-uridine
  modified_base 15: mod_base = OTHER; note = 2'O-methyl-uridine
  modified_base 16: mod_base = OTHER; note = 2' Fluoro-uridine
  modified_base 17: mod_base = OTHER; note = 2'O-methyl-guanosine
  modified_base 18: mod_base = OTHER; note = 2'O-methyl-uridine
  modified_base 19: mod_base = OTHER; note = 2'O-methyl-cytidine
  modified_base 20: mod_base = OTHER; note = 2'O-methyl-adenosine
  modified_base 21: mod_base = OTHER; note = 2'O-methyl-uridine
  modified_base 22: mod_base = OTHER; note = 2'O-methyl-guanosine
  modified_base 23: mod_base = OTHER; note = 2'O-methyl-cytidine
  modified_base 1..2: mod_base = OTHER; note = phosphorothioate linkage
  modified_base 2..3: mod_base = OTHER; note = phosphorothioate linkage
  modified_base 21..22: mod_base = OTHER; note = phosphorothioate linkage
  modified_base 22..23: mod_base = OTHER; note = phosphorothioate linkage
  source 1..23: mol_type = other RNA
ttctcgagttctgtttgtcatgc

SEQ ID NO: 420 - RNA, 23 nt, synthetic construct
  misc_feature 1..23: note = siRNA sequence name:ETXS348
  modified_base 1: mod_base = OTHER; note = 2'O-methyl-guanosine
  modified_base 2: mod_base = OTHER; note = 2' Fluoro-uridine
  modified_base 3: mod_base = OTHER; note = 2'O-methyl-guanosine
  modified_base 4: mod_base = OTHER; note = 2'O-methyl-guanosine
  modified_base 5: mod_base = OTHER; note = 2'O-methyl-adenosine
  modified_base 6: mod_base = OTHER; note = 2' Fluoro-cytidine
  modified_base 7: mod_base = OTHER; note = 2'O-methyl-adenosine
  modified_base 8: mod_base = OTHER; note = 2' Fluoro-guanosine
  modified_base 9: mod_base = OTHER; note = 2' Fluoro-cytidine
  modified_base 10: mod_base = OTHER; note = 2'O-methyl-guanosine
  modified_base 11: mod_base = OTHER; note = 2'O-methyl-guanosine
  modified_base 12: mod_base = OTHER; note = 2'O-methyl-cytidine
  modified_base 13: mod_base = OTHER; note = 2'O-methyl-adenosine
  modified_base 14: mod_base = OTHER; note = 2' Fluoro-uridine
  modified_base 15: mod_base = OTHER; note = 2'O-methyl-guanosine
  modified_base 16: mod_base = OTHER; note = 2'Fluoro-adenosine
  modified_base 17: mod_base = OTHER; note = 2'O-methyl-adenosine
  modified_base 18: mod_base = OTHER; note = 2'O-methyl-cytidine
  modified_base 19: mod_base = OTHER; note = 2'O-methyl-cytidine
  modified_base 20: mod_base = OTHER; note = 2'O-methyl-cytidine
  modified_base 21: mod_base = OTHER; note = 2'O-methyl-cytidine
  modified_base 22: mod_base = OTHER; note = 2'O-methyl-adenosine
  modified_base 23: mod_base = OTHER; note = 2'O-methyl-cytidine
  modified_base 1..2: mod_base = OTHER; note = phosphorothioate linkage
  modified_base 2..3: mod_base = OTHER; note = phosphorothioate linkage
  modified_base 21..22: mod_base = OTHER; note = phosphorothioate linkage
  modified_base 22..23: mod_base = OTHER; note = phosphorothioate linkage
  source 1..23: mol_type = other RNA
gtggacagcggcatgaaccccac

SEQ ID NO: 421 - RNA, 23 nt, synthetic construct
  misc_feature 1..23: note = siRNA sequence name:ETXS350
  modified_base 1: mod_base = OTHER; note = 2'O-methyl-adenosine
  modified_base 2: mod_base = OTHER; note = 2' Fluoro-guanosine
  modified_base 3: mod_base = OTHER; note = 2'O-methyl-guanosine
  modified_base 4: mod_base = OTHER; note = 2'O-methyl-adenosine
  modified_base 5: mod_base = OTHER; note = 2'O-methyl-uridine
  modified_base 6: mod_base = OTHER; note = 2' Fluoro-guanosine
  modified_base 7: mod_base = OTHER; note = 2'O-methyl-uridine
  modified_base 8: mod_base = OTHER; note = 2' Fluoro-uridine
  modified_base 9: mod_base = OTHER; note = 2'Fluoro-adenosine
  modified_base 10: mod_base = OTHER; note = 2'O-methyl-adenosine
  modified_base 11: mod_base = OTHER; note = 2'O-methyl-guanosine
  modified_base 12: mod_base = OTHER; note = 2'O-methyl-adenosine
  modified_base 13: mod_base = OTHER; note = 2'O-methyl-cytidine
  modified_base 14: mod_base = OTHER; note = 2' Fluoro-guanosine
  modified_base 15: mod_base = OTHER; note = 2'O-methyl-cytidine
  modified_base 16: mod_base = OTHER; note = 2' Fluoro-uridine
  modified_base 17: mod_base = OTHER; note = 2'O-methyl-guanosine
  modified_base 18: mod_base = OTHER; note = 2'O-methyl-guanosine
  modified_base 19: mod_base = OTHER; note = 2'O-methyl-adenosine
  modified_base 20: mod_base = OTHER; note = 2'O-methyl-uridine
  modified_base 21: mod_base = OTHER; note = 2'O-methyl-cytidine
  modified_base 22: mod_base = OTHER; note = 2'O-methyl-cytidine
  modified_base 23: mod_base = OTHER; note = 2'O-methyl-guanosine
  modified_base 1..2: mod_base = OTHER; note = phosphorothioate linkage
  modified_base 2..3: mod_base = OTHER; note = phosphorothioate linkage
  modified_base 21..22: mod_base = OTHER; note = phosphorothioate linkage
  modified_base 22..23: mod_base = OTHER; note = phosphorothioate linkage
  source 1..23: mol_type = other RNA
aggatgttaagacgctggatccg

SEQ ID NO: 422 - RNA, 23 nt, synthetic construct
  misc_feature 1..23: note = siRNA sequence name:ETXS352
  modified_base 1: mod_base = OTHER; note = 2'O-methyl-cytidine
  modified_base 2: mod_base = OTHER; note = 2' Fluoro-guanosine
  modified_base 3: mod_base = OTHER; note = 2'O-methyl-adenosine
  modified_base 4: mod_base = OTHER; note = 2'O-methyl-cytidine
  modified_base 5: mod_base = OTHER; note = 2'O-methyl-adenosine
  modified_base 6: mod_base = OTHER; note = 2' Fluoro-guanosine
  modified_base 7: mod_base = OTHER; note = 2'O-methyl-uridine
  modified_base 8: mod_base = OTHER; note = 2' Fluoro-guanosine
  modified_base 9: mod_base = OTHER; note = 2'Fluoro-adenosine
  modified_base 10: mod_base = OTHER; note = 2'O-methyl-adenosine
  modified_base 11: mod_base = OTHER; note = 2'O-methyl-guanosine
  modified_base 12: mod_base = OTHER; note = 2'O-methyl-cytidine
  modified_base 13: mod_base = OTHER; note = 2'O-methyl-guanosine
  modified_base 14: mod_base = OTHER; note = 2' Fluoro-guanosine
  modified_base 15: mod_base = OTHER; note = 2'O-methyl-adenosine
  modified_base 16: mod_base = OTHER; note = 2' Fluoro-cytidine
  modified_base 17: mod_base = OTHER; note = 2'O-methyl-uridine
  modified_base 18: mod_base = OTHER; note = 2'O-methyl-uridine
  modified_base 19: mod_base = OTHER; note = 2'O-methyl-guanosine
  modified_base 20: mod_base = OTHER; note = 2'O-methyl-guanosine
  modified_base 21: mod_base = OTHER; note = 2'O-methyl-guanosine
  modified_base 22: mod_base = OTHER; note = 2'O-methyl-uridine
  modified_base 23: mod_base = OTHER; note = 2'O-methyl-guanosine
  modified_base 1..2: mod_base = OTHER; note = phosphorothioate linkage
  modified_base 2..3: mod_base = OTHER; note = phosphorothioate linkage
  modified_base 21..22: mod_base = OTHER; note = phosphorothioate linkage
  modified_base 22..23: mod_base = OTHER; note = phosphorothioate linkage
  source 1..23: mol_type = other RNA
cgacagtgaagcggacttgggtg

SEQ ID NO: 423 - RNA, 23 nt, synthetic construct
  misc_feature 1..23: note = siRNA sequence name:ETXS354
  modified_base 1: mod_base = OTHER; note = 2'O-methyl-cytidine
  modified_base 2: mod_base = OTHER; note = 2' Fluoro-uridine
  modified_base 3: mod_base = OTHER; note = 2'O-methyl-cytidine
  modified_base 4: mod_base = OTHER; note = 2'O-methyl-uridine
  modified_base 5: mod_base = OTHER; note = 2'O-methyl-cytidine
  modified_base 6: mod_base = OTHER; note = 2' Fluoro-uridine
  modified_base 7: mod_base = OTHER; note = 2'O-methyl-cytidine
  modified_base 8: mod_base = OTHER; note = 2'Fluoro-adenosine
  modified_base 9: mod_base = OTHER; note = 2' Fluoro-uridine
  modified_base 10: mod_base = OTHER; note = 2'O-methyl-uridine
  modified_base 11: mod_base = OTHER; note = 2'O-methyl-cytidine
  modified_base 12: mod_base = OTHER; note = 2'O-methyl-adenosine
  modified_base 13: mod_base = OTHER; note = 2'O-methyl-guanosine
  modified_base 14: mod_base = OTHER; note = 2' Fluoro-cytidine
  modified_base 15: mod_base = OTHER; note = 2'O-methyl-cytidine
  modified_base 16: mod_base = OTHER; note = 2' Fluoro-guanosine
  modified_base 17: mod_base = OTHER; note = 2'O-methyl-guanosine
  modified_base 18: mod_base = OTHER; note = 2'O-methyl-adenosine
  modified_base 19: mod_base = OTHER; note = 2'O-methyl-adenosine
  modified_base 20: mod_base = OTHER; note = 2'O-methyl-guanosine
  modified_base 21: mod_base = OTHER; note = 2'O-methyl-uridine
  modified_base 22: mod_base = OTHER; note = 2'O-methyl-uridine
  modified_base 23: mod_base = OTHER; note = 2'O-methyl-guanosine
  modified_base 1..2: mod_base = OTHER; note = phosphorothioate linkage
  modified_base 2..3: mod_base = OTHER; note = phosphorothioate linkage
  modified_base 21..22: mod_base = OTHER; note = phosphorothioate linkage
  modified_base 22..23: mod_base = OTHER; note = phosphorothioate linkage
  source 1..23: mol_type = other RNA
ctctctcattcagccggaagttg

SEQ ID NO: 424 - RNA, 23 nt, synthetic construct
  misc_feature 1..23: note = siRNA sequence name:ETXS356
  modified_base 1: mod_base = OTHER; note = 2'O-methyl-cytidine
  modified_base 2: mod_base = OTHER; note = 2' Fluoro-uridine
  modified_base 3: mod_base = OTHER; note = 2'O-methyl-guanosine
  modified_base 4: mod_base = OTHER; note = 2'O-methyl-guanosine
  modified_base 5: mod_base = OTHER; note = 2'O-methyl-guanosine
  modified_base 6: mod_base = OTHER; note = 2' Fluoro-cytidine
  modified_base 7: mod_base = OTHER; note = 2'O-methyl-cytidine
  modified_base 8: mod_base = OTHER; note = 2' Fluoro-uridine
  modified_base 9: mod_base = OTHER; note = 2' Fluoro-cytidine
  modified_base 10: mod_base = OTHER; note = 2'O-methyl-adenosine
  modified_base 11: mod_base = OTHER; note = 2'O-methyl-guanosine
  modified_base 12: mod_base = OTHER; note = 2'O-methyl-cytidine
  modified_base 13: mod_base = OTHER; note = 2'O-methyl-adenosine
  modified_base 14: mod_base = OTHER; note = 2'Fluoro-adenosine
  modified_base 15: mod_base = OTHER; note = 2'O-methyl-adenosine
  modified_base 16: mod_base = OTHER; note = 2' Fluoro-guanosine
  modified_base 17: mod_base = OTHER; note = 2'O-methyl-uridine
  modified_base 18: mod_base = OTHER; note = 2'O-methyl-adenosine
  modified_base 19: mod_base = OTHER; note = 2'O-methyl-adenosine
  modified_base 20: mod_base = OTHER; note = 2'O-methyl-uridine
  modified_base 21: mod_base = OTHER; note = 2'O-methyl-adenosine
  modified_base 22: mod_base = OTHER; note = 2'O-methyl-cytidine
  modified_base 23: mod_base = OTHER; note = 2'O-methyl-uridine
  modified_base 1..2: mod_base = OTHER; note = phosphorothioate linkage
  modified_base 2..3: mod_base = OTHER; note = phosphorothioate linkage
  modified_base 21..22: mod_base = OTHER; note = phosphorothioate linkage
  modified_base 22..23: mod_base = OTHER; note = phosphorothioate linkage
  source 1..23: mol_type = other RNA
ctgggcctcagcaaagtaatact

SEQ ID NO: 425 - RNA, 23 nt, synthetic construct
  misc_feature 1..23: note = siRNA sequence name:ETXS358
  modified_base 1: mod_base = OTHER; note = 2'O-methyl-adenosine
  modified_base 2: mod_base = OTHER; note = 2' Fluoro-guanosine
  modified_base 3: mod_base = OTHER; note = 2'O-methyl-cytidine
  modified_base 4: mod_base = OTHER; note = 2'O-methyl-adenosine
  modified_base 5: mod_base = OTHER; note = 2'O-methyl-guanosine
  modified_base 6: mod_base = OTHER; note = 2' Fluoro-guanosine
  modified_base 7: mod_base = OTHER; note = 2'O-methyl-guanosine
  modified_base 8: mod_base = OTHER; note = 2' Fluoro-uridine
  modified_base 9: mod_base = OTHER; note = 2' Fluoro-cytidine
  modified_base 10: mod_base = OTHER; note = 2'O-methyl-uridine
  modified_base 11: mod_base = OTHER; note = 2'O-methyl-adenosine
  modified_base 12: mod_base = OTHER; note = 2'O-methyl-uridine
  modified_base 13: mod_base = OTHER; note = 2'O-methyl-adenosine
  modified_base 14: mod_base = OTHER; note = 2' Fluoro-uridine
  modified_base 15: mod_base = OTHER; note = 2'O-methyl-uridine
  modified_base 16: mod_base = OTHER; note = 2' Fluoro-cytidine
  modified_base 17: mod_base = OTHER; note = 2'O-methyl-uridine
  modified_base 18: mod_base = OTHER; note = 2'O-methyl-cytidine
  modified_base 19: mod_base = OTHER; note = 2'O-methyl-cytidine
  modified_base 20: mod_base = OTHER; note = 2'O-methyl-adenosine
  modified_base 21: mod_base = OTHER; note = 2'O-methyl-guanosine
  modified_base 22: mod_base = OTHER; note = 2'O-methyl-adenosine
  modified_base 23: mod_base = OTHER; note = 2'O-methyl-guanosine
  modified_base 1..2: mod_base = OTHER; note = phosphorothioate linkage
  modified_base 2..3: mod_base = OTHER; note = phosphorothioate linkage
  modified_base 21..22: mod_base = OTHER; note = phosphorothioate linkage
  modified_base 22..23: mod_base = OTHER; note = phosphorothioate linkage
  source 1..23: mol_type = other RNA
agcagggtctatattctccagag

SEQ ID NO: 426 - RNA, 23 nt, synthetic construct
  misc_feature 1..23: note = siRNA sequence name:ETXS360
  modified_base 1: mod_base = OTHER; note = 2'O-methyl-adenosine
  modified_base 2: mod_base = OTHER; note = 2' Fluoro-guanosine
  modified_base 3: mod_base = OTHER; note = 2'O-methyl-uridine
  modified_base 4: mod_base = OTHER; note = 2'O-methyl-adenosine
  modified_base 5: mod_base = OTHER; note = 2'O-methyl-guanosine
  modified_base 6: mod_base = OTHER; note = 2'Fluoro-adenosine
  modified_base 7: mod_base = OTHER; note = 2'O-methyl-uridine
  modified_base 8: mod_base = OTHER; note = 2' Fluoro-guanosine
  modified_base 9: mod_base = OTHER; note = 2' Fluoro-cytidine
  modified_base 10: mod_base = OTHER; note = 2'O-methyl-adenosine
  modified_base 11: mod_base = OTHER; note = 2'O-methyl-guanosine
  modified_base 12: mod_base = OTHER; note = 2'O-methyl-uridine
  modified_base 13: mod_base = OTHER; note = 2'O-methyl-uridine
  modified_base 14: mod_base = OTHER; note = 2' Fluoro-guanosine
  modified_base 15: mod_base = OTHER; note = 2'O-methyl-adenosine
  modified_base 16: mod_base = OTHER; note = 2' Fluoro-guanosine
  modified_base 17: mod_base = OTHER; note = 2'O-methyl-adenosine
  modified_base 18: mod_base = OTHER; note = 2'O-methyl-adenosine
  modified_base 19: mod_base = OTHER; note = 2'O-methyl-uridine
  modified_base 20: mod_base = OTHER; note = 2'O-methyl-cytidine
  modified_base 21: mod_base = OTHER; note = 2'O-methyl-adenosine
  modified_base 22: mod_base = OTHER; note = 2'O-methyl-uridine
  modified_base 23: mod_base = OTHER; note = 2'O-methyl-cytidine
  modified_base 1..2: mod_base = OTHER; note = phosphorothioate linkage
  modified_base 2..3: mod_base = OTHER; note = phosphorothioate linkage
  modified_base 21..22: mod_base = OTHER; note = phosphorothioate linkage
  modified_base 22..23: mod_base = OTHER; note = phosphorothioate linkage
  source 1..23: mol_type = other RNA
agtagatgcagttgagaatcatc

SEQ ID NO: 427 - RNA, 23 nt, synthetic construct
  misc_feature 1..23: note = siRNA sequence name:ETXS362
  modified_base 1: mod_base = OTHER; note = 2'O-methyl-guanosine
  modified_base 2: mod_base = OTHER; note = 2' Fluoro-guanosine
  modified_base 3: mod_base = OTHER; note = 2'O-methyl-adenosine
  modified_base 4: mod_base = OTHER; note = 2'O-methyl-cytidine
  modified_base 5: mod_base = OTHER; note = 2'O-methyl-uridine
  modified_base 6: mod_base = OTHER; note = 2' Fluoro-uridine
  modified_base 7: mod_base = OTHER; note = 2'O-methyl-guanosine
  modified_base 8: mod_base = OTHER; note = 2' Fluoro-guanosine
  modified_base 9: mod_base = OTHER; note = 2' Fluoro-guanosine
  modified_base 10: mod_base = OTHER; note = 2'O-methyl-uridine
  modified_base 11: mod_base = OTHER; note = 2'O-methyl-guanosine
  modified_base 12: mod_base = OTHER; note = 2'O-methyl-guanosine
  modified_base 13: mod_base = OTHER; note = 2'O-methyl-adenosine
  modified_base 14: mod_base = OTHER; note = 2' Fluoro-cytidine
  modified_base 15: mod_base = OTHER; note = 2'O-methyl-adenosine
  modified_base 16: mod_base = OTHER; note = 2' Fluoro-guanosine
  modified_base 17: mod_base = OTHER; note = 2'O-methyl-cytidine
  modified_base 18: mod_base = OTHER; note = 2'O-methyl-guanosine
  modified_base 19: mod_base = OTHER; note = 2'O-methyl-guanosine
  modified_base 20: mod_base = OTHER; note = 2'O-methyl-cytidine
  modified_base 21: mod_base = OTHER; note = 2'O-methyl-adenosine
  modified_base 22: mod_base = OTHER; note = 2'O-methyl-uridine
  modified_base 23: mod_base = OTHER; note = 2'O-methyl-guanosine
  modified_base 1..2: mod_base = OTHER; note = phosphorothioate linkage
  modified_base 2..3: mod_base = OTHER; note = phosphorothioate linkage
  modified_base 21..22: mod_base = OTHER; note = phosphorothioate linkage
  modified_base 22..23: mod_base = OTHER; note = phosphorothioate linkage
  source 1..23: mol_type = other RNA
ggacttgggtggacagcggcatg

SEQ ID NO: 428 - RNA, 23 nt, synthetic construct
  misc_feature 1..23: note = siRNA sequence name:ETXS364
  modified_base 1: mod_base = OTHER; note = 2'O-methyl-uridine
  modified_base 2: mod_base = OTHER; note = 2' Fluoro-uridine
  modified_base 3: mod_base = OTHER; note = 2'O-methyl-uridine
  modified_base 4: mod_base = OTHER; note = 2'O-methyl-guanosine
  modified_base 5: mod_base = OTHER; note = 2'O-methyl-adenosine
  modified_base 6: mod_base = OTHER; note = 2'Fluoro-adenosine
  modified_base 7: mod_base = OTHER; note = 2'O-methyl-guanosine
  modified_base 8: mod_base = OTHER; note = 2' Fluoro-uridine
  modified_base 9: mod_base = OTHER; note = 2'Fluoro-adenosine
  modified_base 10: mod_base = OTHER; note = 2'O-methyl-guanosine
  modified_base 11: mod_base = OTHER; note = 2'O-methyl-adenosine
  modified_base 12: mod_base = OTHER; note = 2'O-methyl-uridine
  modified_base 13: mod_base = OTHER; note = 2'O-methyl-guanosine
  modified_base 14: mod_base = OTHER; note = 2' Fluoro-cytidine
  modified_base 15: mod_base = OTHER; note = 2'O-methyl-adenosine
  modified_base 16: mod_base = OTHER; note = 2' Fluoro-guanosine
  modified_base 17: mod_base = OTHER; note = 2'O-methyl-uridine
  modified_base 18: mod_base = OTHER; note = 2'O-methyl-uridine
  modified_base 19: mod_base = OTHER; note = 2'O-methyl-guanosine
  modified_base 20: mod_base = OTHER; note = 2'O-methyl-adenosine
  modified_base 21: mod_base = OTHER; note = 2'O-methyl-guanosine
  modified_base 22: mod_base = OTHER; note = 2'O-methyl-adenosine
  modified_base 23: mod_base = OTHER; note = 2'O-methyl-adenosine
  modified_base 1..2: mod_base = OTHER; note = phosphorothioate linkage
  modified_base 2..3: mod_base = OTHER; note = phosphorothioate linkage
  modified_base 21..22: mod_base = OTHER; note = phosphorothioate linkage
  modified_base 22..23: mod_base = OTHER; note = phosphorothioate linkage
  source 1..23: mol_type = other RNA
tttgaagtagatgcagttgagaa

SEQ ID NO: 429 - RNA, 23 nt, synthetic construct
  misc_feature 1..23: note = siRNA sequence name:ETXS366
  modified_base 1: mod_base = OTHER; note = 2'O-methyl-cytidine
  modified_base 2: mod_base = OTHER; note = 2'Fluoro-adenosine
  modified_base 3: mod_base = OTHER; note = 2'O-methyl-uridine
  modified_base 4: mod_base = OTHER; note = 2'O-methyl-uridine
  modified_base 5: mod_base = OTHER; note = 2'O-methyl-cytidine
  modified_base 6: mod_base = OTHER; note = 2'Fluoro-adenosine
  modified_base 7: mod_base = OTHER; note = 2'O-methyl-guanosine
  modified_base 8: mod_base = OTHER; note = 2' Fluoro-cytidine
  modified_base 9: mod_base = OTHER; note = 2' Fluoro-cytidine
  modified_base 10: mod_base = OTHER; note = 2'O-methyl-guanosine
  modified_base 11: mod_base = OTHER; note = 2'O-methyl-guanosine
  modified_base 12: mod_base = OTHER; note = 2'O-methyl-adenosine
  modified_base 13: mod_base = OTHER; note = 2'O-methyl-adenosine
  modified_base 14: mod_base = OTHER; note = 2' Fluoro-guanosine
  modified_base 15: mod_base = OTHER; note = 2'O-methyl-uridine
  modified_base 16: mod_base = OTHER; note = 2' Fluoro-uridine
  modified_base 17: mod_base = OTHER; note = 2'O-methyl-guanosine
  modified_base 18: mod_base = OTHER; note = 2'O-methyl-uridine
  modified_base 19: mod_base = OTHER; note = 2'O-methyl-guanosine
  modified_base 20: mod_base = OTHER; note = 2'O-methyl-guanosine
  modified_base 21: mod_base = OTHER; note = 2'O-methyl-uridine
  modified_base 22: mod_base = OTHER; note = 2'O-methyl-uridine
  modified_base 23: mod_base = OTHER; note = 2'O-methyl-guanosine
  modified_base 1..2: mod_base = OTHER; note = phosphorothioate linkage
  modified_base 2..3: mod_base = OTHER; note = phosphorothioate linkage
  modified_base 21..22: mod_base = OTHER; note = phosphorothioate linkage
  modified_base 22..23: mod_base = OTHER; note = phosphorothioate linkage
  source 1..23: mol_type = other RNA
cattcagccggaagttgtggttg

SEQ ID NO: 430 - RNA, 23 nt, synthetic construct
  misc_feature 1..23: note = siRNA sequence name:ETXS368
  modified_base 1: mod_base = OTHER; note = 2'O-methyl-adenosine
  modified_base 2: mod_base = OTHER; note = 2' Fluoro-cytidine
  modified_base 3: mod_base = OTHER; note = 2'O-methyl-adenosine
  modified_base 4: mod_base = OTHER; note = 2'O-methyl-guanosine
  modified_base 5: mod_base = OTHER; note = 2'O-methyl-cytidine
  modified_base 6: mod_base = OTHER; note = 2' Fluoro-guanosine
  modified_base 7: mod_base = OTHER; note = 2'O-methyl-guanosine
  modified_base 8: mod_base = OTHER; note = 2' Fluoro-cytidine
  modified_base 9: mod_base = OTHER; note = 2'Fluoro-adenosine
  modified_base 10: mod_base = OTHER; note = 2'O-methyl-uridine
  modified_base 11: mod_base = OTHER; note = 2'O-methyl-guanosine
  modified_base 12: mod_base = OTHER; note = 2'O-methyl-adenosine
  modified_base 13: mod_base = OTHER; note = 2'O-methyl-adenosine
  modified_base 14: mod_base = OTHER; note = 2' Fluoro-cytidine
  modified_base 15: mod_base = OTHER; note = 2'O-methyl-cytidine
  modified_base 16: mod_base = OTHER; note = 2' Fluoro-cytidine
  modified_base 17: mod_base = OTHER; note = 2'O-methyl-cytidine
  modified_base 18: mod_base = OTHER; note = 2'O-methyl-adenosine
  modified_base 19: mod_base = OTHER; note = 2'O-methyl-cytidine
  modified_base 20: mod_base = OTHER; note = 2'O-methyl-cytidine
  modified_base 21: mod_base = OTHER; note = 2'O-methyl-guanosine
  modified_base 22: mod_base = OTHER; note = 2'O-methyl-uridine
  modified_base 23: mod_base = OTHER; note = 2'O-methyl-guanosine
  modified_base 1..2: mod_base = OTHER; note = phosphorothioate linkage
  modified_base 2..3: mod_base = OTHER; note = phosphorothioate linkage
  modified_base 21..22: mod_base = OTHER; note = phosphorothioate linkage
  modified_base 22..23: mod_base = OTHER; note = phosphorothioate linkage
  source 1..23: mol_type = other RNA
acagcggcatgaaccccaccgtg

SEQ ID NO: 431 - RNA, 23 nt, synthetic construct
  misc_feature 1..23: note = siRNA sequence name:ETXS370
  modified_base 1: mod_base = OTHER; note = 2'O-methyl-cytidine
  modified_base 2: mod_base = OTHER; note = 2' Fluoro-cytidine
  modified_base 3: mod_base = OTHER; note = 2'O-methyl-uridine
  modified_base 4: mod_base = OTHER; note = 2'O-methyl-cytidine
  modified_base 5: mod_base = OTHER; note = 2'O-methyl-uridine
  modified_base 6: mod_base = OTHER; note = 2' Fluoro-cytidine
  modified_base 7: mod_base = OTHER; note = 2'O-methyl-uridine
  modified_base 8: mod_base = OTHER; note = 2' Fluoro-cytidine
  modified_base 9: mod_base = OTHER; note = 2' Fluoro-uridine
  modified_base 10: mod_base = OTHER; note = 2'O-methyl-cytidine
  modified_base 11: mod_base = OTHER; note = 2'O-methyl-adenosine
  modified_base 12: mod_base = OTHER; note = 2'O-methyl-uridine
  modified_base 13: mod_base = OTHER; note = 2'O-methyl-uridine
  modified_base 14: mod_base = OTHER; note = 2' Fluoro-cytidine
  modified_base 15: mod_base = OTHER; note = 2'O-methyl-adenosine
  modified_base 16: mod_base = OTHER; note = 2' Fluoro-guanosine
  modified_base 17: mod_base = OTHER; note = 2'O-methyl-cytidine
  modified_base 18: mod_base = OTHER; note = 2'O-methyl-cytidine
  modified_base 19: mod_base = OTHER; note = 2'O-methyl-guanosine
  modified_base 20: mod_base = OTHER; note = 2'O-methyl-guanosine
  modified_base 21: mod_base = OTHER; note = 2'O-methyl-adenosine
  modified_base 22: mod_base = OTHER; note = 2'O-methyl-adenosine
  modified_base 23: mod_base = OTHER; note = 2'O-methyl-guanosine
  modified_base 1..2: mod_base = OTHER; note = phosphorothioate linkage
  modified_base 2..3: mod_base = OTHER; note = phosphorothioate linkage
  modified_base 21..22: mod_base = OTHER; note = phosphorothioate linkage
  modified_base 22..23: mod_base = OTHER; note = phosphorothioate linkage
  source 1..23: mol_type = other RNA
cctctctctcattcagccggaag

SEQ ID NO: 432 - RNA, 23 nt, synthetic construct
  misc_feature 1..23: note = siRNA sequence name:ETXS372
  modified_base 1: mod_base = OTHER; note = 2'O-methyl-adenosine
  modified_base 2: mod_base = OTHER; note = 2' Fluoro-cytidine
  modified_base 3: mod_base = OTHER; note = 2'O-methyl-cytidine
  modified_base 4: mod_base = OTHER; note = 2'O-methyl-cytidine
  modified_base 5: mod_base = OTHER; note = 2'O-methyl-adenosine
  modified_base 6: mod_base = OTHER; note = 2'Fluoro-adenosine
  modified_base 7: mod_base = OTHER; note = 2'O-methyl-adenosine
  modified_base 8: mod_base = OTHER; note = 2'Fluoro-adenosine
  modified_base 9: mod_base = OTHER; note = 2' Fluoro-uridine
  modified_base 10: mod_base = OTHER; note = 2'O-methyl-uridine
  modified_base 11: mod_base = OTHER; note = 2'O-methyl-cytidine
  modified_base 12: mod_base = OTHER; note = 2'O-methyl-cytidine
  modified_base 13: mod_base = OTHER; note = 2'O-methyl-uridine
  modified_base 14: mod_base = OTHER; note = 2' Fluoro-cytidine
  modified_base 15: mod_base = OTHER; note = 2'O-methyl-cytidine
  modified_base 16: mod_base = OTHER; note = 2' Fluoro-uridine
  modified_base 17: mod_base = OTHER; note = 2'O-methyl-guanosine
  modified_base 18: mod_base = OTHER; note = 2'O-methyl-adenosine
  modified_base 19: mod_base = OTHER; note = 2'O-methyl-adenosine
  modified_base 20: mod_base = OTHER; note = 2'O-methyl-guanosine
  modified_base 21: mod_base = OTHER; note = 2'O-methyl-adenosine
  modified_base 22: mod_base = OTHER; note = 2'O-methyl-guanosine
  modified_base 23: mod_base = OTHER; note = 2'O-methyl-guanosine
  modified_base 1..2: mod_base = OTHER; note = phosphorothioate linkage
  modified_base 2..3: mod_base = OTHER; note = phosphorothioate linkage
  modified_base 21..22: mod_base = OTHER; note = phosphorothioate linkage
  modified_base 22..23: mod_base = OTHER; note = phosphorothioate linkage
  source 1..23: mol_type = other RNA
acccaaaattcctcctgaagagg

SEQ ID NO: 433 - RNA, 23 nt, synthetic construct
  misc_feature 1..23: note = siRNA sequence name:ETXS374
  modified_base 1: mod_base = OTHER; note = 2'O-methyl-uridine
  modified_base 2: mod_base = OTHER; note = 2' Fluoro-guanosine
  modified_base 3: mod_base = OTHER; note = 2'O-methyl-guanosine
  modified_base 4: mod_base = OTHER; note = 2'O-methyl-guanosine
  modified_base 5: mod_base = OTHER; note = 2'O-methyl-cytidine
  modified_base 6: mod_base = OTHER; note = 2' Fluoro-cytidine
  modified_base 7: mod_base = OTHER; note = 2'O-methyl-uridine
  modified_base 8: mod_base = OTHER; note = 2' Fluoro-cytidine
  modified_base 9: mod_base = OTHER; note = 2'Fluoro-adenosine
  modified_base 10: mod_base = OTHER; note = 2'O-methyl-guanosine
  modified_base 11: mod_base = OTHER; note = 2'O-methyl-cytidine
  modified_base 12: mod_base = OTHER; note = 2'O-methyl-adenosine
  modified_base 13: mod_base = OTHER; note = 2'O-methyl-adenosine
  modified_base 14: mod_base = OTHER; note = 2'Fluoro-adenosine
  modified_base 15: mod_base = OTHER; note = 2'O-methyl-guanosine
  modified_base 16: mod_base = OTHER; note = 2' Fluoro-uridine
  modified_base 17: mod_base = OTHER; note = 2'O-methyl-adenosine
  modified_base 18: mod_base = OTHER; note = 2'O-methyl-adenosine
  modified_base 19: mod_base = OTHER; note = 2'O-methyl-uridine
  modified_base 20: mod_base = OTHER; note = 2'O-methyl-adenosine
  modified_base 21: mod_base = OTHER; note = 2'O-methyl-cytidine
  modified_base 22: mod_base = OTHER; note = 2'O-methyl-uridine
  modified_base 23: mod_base = OTHER; note = 2'O-methyl-cytidine
  modified_base 1..2: mod_base = OTHER; note = phosphorothioate linkage
  modified_base 2..3: mod_base = OTHER; note = phosphorothioate linkage
  modified_base 21..22: mod_base = OTHER; note = phosphorothioate linkage
  modified_base 22..23: mod_base = OTHER; note = phosphorothioate linkage
  source 1..23: mol_type = other RNA
tgggcctcagcaaagtaatactc

SEQ ID NO: 434 - RNA, 23 nt, synthetic construct
  misc_feature 1..23: note = siRNA sequence name:ETXS376
  modified_base 1: mod_base = OTHER; note = 2'O-methyl-adenosine
  modified_base 2: mod_base = OTHER; note = 2'Fluoro-adenosine
  modified_base 3: mod_base = OTHER; note = 2'O-methyl-guanosine
  modified_base 4: mod_base = OTHER; note = 2'O-methyl-uridine
  modified_base 5: mod_base = OTHER; note = 2'O-methyl-adenosine
  modified_base 6: mod_base = OTHER; note = 2' Fluoro-guanosine
  modified_base 7: mod_base = OTHER; note = 2'O-methyl-adenosine
  modified_base 8: mod_base = OTHER; note = 2' Fluoro-uridine
  modified_base 9: mod_base = OTHER; note = 2' Fluoro-guanosine
  modified_base 10: mod_base = OTHER; note = 2'O-methyl-cytidine
  modified_base 11: mod_base = OTHER; note = 2'O-methyl-adenosine
  modified_base 12: mod_base = OTHER; note = 2'O-methyl-guanosine
  modified_base 13: mod_base = OTHER; note = 2'O-methyl-uridine
  modified_base 14: mod_base = OTHER; note = 2' Fluoro-uridine
  modified_base 15: mod_base = OTHER; note = 2'O-methyl-guanosine
  modified_base 16: mod_base = OTHER; note = 2'Fluoro-adenosine
  modified_base 17: mod_base = OTHER; note = 2'O-methyl-guanosine
  modified_base 18: mod_base = OTHER; note = 2'O-methyl-adenosine
  modified_base 19: mod_base = OTHER; note = 2'O-methyl-adenosine
  modified_base 20: mod_base = OTHER; note = 2'O-methyl-uridine
  modified_base 21: mod_base = OTHER; note = 2'O-methyl-cytidine
  modified_base 22: mod_base = OTHER; note = 2'O-methyl-adenosine
  modified_base 23: mod_base = OTHER; note = 2'O-methyl-uridine
  modified_base 1..2: mod_base = OTHER; note = phosphorothioate linkage
  modified_base 2..3: mod_base = OTHER; note = phosphorothioate linkage
  modified_base 21..22: mod_base = OTHER; note = phosphorothioate linkage
  modified_base 22..23: mod_base = OTHER; note = phosphorothioate linkage
  source 1..23: mol_type = other RNA
aagtagatgcagttgagaatcat

SEQ ID NO: 435 - RNA, 23 nt, synthetic construct
  misc_feature 1..23: note = siRNA sequence name:ETXS378
  modified_base 1: mod_base = OTHER; note = 2'O-methyl-guanosine
  modified_base 2: mod_base = OTHER; note = 2' Fluoro-cytidine
  modified_base 3: mod_base = OTHER; note = 2'O-methyl-guanosine
  modified_base 4: mod_base = OTHER; note = 2'O-methyl-adenosine
  modified_base 5: mod_base = OTHER; note = 2'O-methyl-uridine
  modified_base 6: mod_base = OTHER; note = 2' Fluoro-cytidine
  modified_base 7: mod_base = OTHER; note = 2'O-methyl-cytidine
  modified_base 8: mod_base = OTHER; note = 2' Fluoro-uridine
  modified_base 9: mod_base = OTHER; note = 2' Fluoro-uridine
  modified_base 10: mod_base = OTHER; note = 2'O-methyl-uridine
  modified_base 11: mod_base = OTHER; note = 2'O-methyl-guanosine
  modified_base 12: mod_base = OTHER; note = 2'O-methyl-guanosine
  modified_base 13: mod_base = OTHER; note = 2'O-methyl-uridine
  modified_base 14: mod_base = OTHER; note = 2' Fluoro-cytidine
  modified_base 15: mod_base = OTHER; note = 2'O-methyl-uridine
  modified_base 16: mod_base = OTHER; note = 2' Fluoro-guanosine
  modified_base 17: mod_base = OTHER; note = 2'O-methyl-adenosine
  modified_base 18: mod_base = OTHER; note = 2'O-methyl-guanosine
  modified_base 19: mod_base = OTHER; note = 2'O-methyl-adenosine
  modified_base 20: mod_base = OTHER; note = 2'O-methyl-uridine
  modified_base 21: mod_base = OTHER; note = 2'O-methyl-guanosine
  modified_base 22: mod_base = OTHER; note = 2'O-methyl-cytidine
  modified_base 23: mod_base = OTHER; note = 2'O-methyl-cytidine
  modified_base 1..2: mod_base = OTHER; note = phosphorothioate linkage
  modified_base 2..3: mod_base = OTHER; note = phosphorothioate linkage
  modified_base 21..22: mod_base = OTHER; note = phosphorothioate linkage
  modified_base 22..23: mod_base = OTHER; note = phosphorothioate linkage
  source 1..23: mol_type = other RNA
gcgatcctttggtctgagatgcc

SEQ ID NO: 436 - RNA, 23 nt, synthetic construct
  misc_feature 1..23: note = siRNA sequence name:ETXS380
  modified_base 1: mod_base = OTHER; note = 2'O-methyl-guanosine
  modified_base 2: mod_base = OTHER; note = 2'Fluoro-adenosine
  modified_base 3: mod_base = OTHER; note = 2'O-methyl-uridine
  modified_base 4: mod_base = OTHER; note = 2'O-methyl-cytidine
  modified_base 5: mod_base = OTHER; note = 2'O-methyl-cytidine
  modified_base 6: mod_base = OTHER; note = 2' Fluoro-uridine
  modified_base 7: mod_base = OTHER; note = 2'O-methyl-uridine
  modified_base 8: mod_base = OTHER; note = 2' Fluoro-uridine
  modified_base 9: mod_base = OTHER; note = 2' Fluoro-guanosine
  modified_base 10: mod_base = OTHER; note = 2'O-methyl-guanosine
  modified_base 11: mod_base = OTHER; note = 2'O-methyl-uridine
  modified_base 12: mod_base = OTHER; note = 2'O-methyl-cytidine
  modified_base 13: mod_base = OTHER; note = 2'O-methyl-uridine
  modified_base 14: mod_base = OTHER; note = 2' Fluoro-guanosine
  modified_base 15: mod_base = OTHER; note = 2'O-methyl-adenosine
  modified_base 16: mod_base = OTHER; note = 2' Fluoro-guanosine
  modified_base 17: mod_base = OTHER; note = 2'O-methyl-adenosine
  modified_base 18: mod_base = OTHER; note = 2'O-methyl-uridine
  modified_base 19: mod_base = OTHER; note = 2'O-methyl-guanosine
  modified_base 20: mod_base = OTHER; note = 2'O-methyl-cytidine
  modified_base 21: mod_base = OTHER; note = 2'O-methyl-cytidine
  modified_base 22: mod_base = OTHER; note = 2'O-methyl-uridine
  modified_base 23: mod_base = OTHER; note = 2'O-methyl-guanosine
  modified_base 1..2: mod_base = OTHER; note = phosphorothioate linkage
  modified_base 2..3: mod_base = OTHER; note = phosphorothioate linkage
  modified_base 21..22: mod_base = OTHER; note = phosphorothioate linkage
  modified_base 22..23: mod_base = OTHER; note = phosphorothioate linkage
  source 1..23: mol_type = other RNA
gatcctttggtctgagatgcctg

SEQ ID NO: 437 - RNA, 23 nt, synthetic construct
  misc_feature 1..23: note = siRNA sequence name:ETXS382
  modified_base 1: mod_base = OTHER; note = 2'O-methyl-cytidine
  modified_base 2: mod_base = OTHER; note = 2' Fluoro-uridine
  modified_base 3: mod_base = OTHER; note = 2'O-methyl-uridine
  modified_base 4: mod_base = OTHER; note = 2'O-methyl-uridine
  modified_base 5: mod_base = OTHER; note = 2'O-methyl-guanosine
  modified_base 6: mod_base = OTHER; note = 2'Fluoro-adenosine
  modified_base 7: mod_base = OTHER; note = 2'O-methyl-adenosine
  modified_base 8: mod_base = OTHER; note = 2' Fluoro-guanosine
  modified_base 9: mod_base = OTHER; note = 2' Fluoro-uridine
  modified_base 10: mod_base = OTHER; note = 2'O-methyl-adenosine
  modified_base 11: mod_base = OTHER; note = 2'O-methyl-guanosine
  modified_base 12: mod_base = OTHER; note = 2'O-methyl-adenosine
  modified_base 13: mod_base = OTHER; note = 2'O-methyl-uridine
  modified_base 14: mod_base = OTHER; note = 2' Fluoro-guanosine
  modified_base 15: mod_base = OTHER; note = 2'O-methyl-cytidine
  modified_base 16: mod_base = OTHER; note = 2'Fluoro-adenosine
  modified_base 17: mod_base = OTHER; note = 2'O-methyl-guanosine
  modified_base 18: mod_base = OTHER; note = 2'O-methyl-uridine
  modified_base 19: mod_base = OTHER; note = 2'O-methyl-uridine
  modified_base 20: mod_base = OTHER; note = 2'O-methyl-guanosine
  modified_base 21: mod_base = OTHER; note = 2'O-methyl-adenosine
  modified_base 22: mod_base = OTHER; note = 2'O-methyl-guanosine
  modified_base 23: mod_base = OTHER; note = 2'O-methyl-adenosine
  modified_base 1..2: mod_base = OTHER; note = phosphorothioate linkage
  modified_base 2..3: mod_base = OTHER; note = phosphorothioate linkage
  modified_base 21..22: mod_base = OTHER; note = phosphorothioate linkage
  modified_base 22..23: mod_base = OTHER; note = phosphorothioate linkage
  source 1..23: mol_type = other RNA
ctttgaagtagatgcagttgaga

SEQ ID NO: 438 - RNA, 23 nt, synthetic construct
  misc_feature 1..23: note = siRNA sequence name:ETXS384
  modified_base 1: mod_base = OTHER; note = 2'O-methyl-guanosine
  modified_base 2: mod_base = OTHER; note = 2' Fluoro-uridine
  modified_base 3: mod_base = OTHER; note = 2'O-methyl-cytidine
  modified_base 4: mod_base = OTHER; note = 2'O-methyl-guanosine
  modified_base 5: mod_base = OTHER; note = 2'O-methyl-adenosine
  modified_base 6: mod_base = OTHER; note = 2' Fluoro-cytidine
  modified_base 7: mod_base = OTHER; note = 2'O-methyl-adenosine
  modified_base 8: mod_base = OTHER; note = 2' Fluoro-guanosine
  modified_base 9: mod_base = OTHER; note = 2' Fluoro-uridine
  modified_base 10: mod_base = OTHER; note = 2'O-methyl-guanosine
  modified_base 11: mod_base = OTHER; note = 2'O-methyl-adenosine
  modified_base 12: mod_base = OTHER; note = 2'O-methyl-adenosine
  modified_base 13: mod_base = OTHER; note = 2'O-methyl-guanosine
  modified_base 14: mod_base = OTHER; note = 2' Fluoro-cytidine
  modified_base 15: mod_base = OTHER; note = 2'O-methyl-guanosine
  modified_base 16: mod_base = OTHER; note = 2' Fluoro-guanosine
  modified_base 17: mod_base = OTHER; note = 2'O-methyl-adenosine
  modified_base 18: mod_base = OTHER; note = 2'O-methyl-cytidine
  modified_base 19: mod_base = OTHER; note = 2'O-methyl-uridine
  modified_base 20: mod_base = OTHER; note = 2'O-methyl-uridine
  modified_base 21: mod_base = OTHER; note = 2'O-methyl-guanosine
  modified_base 22: mod_base = OTHER; note = 2'O-methyl-guanosine
  modified_base 23: mod_base = OTHER; note = 2'O-methyl-guanosine
  modified_base 1..2: mod_base = OTHER; note = phosphorothioate linkage
  modified_base 2..3: mod_base = OTHER; note = phosphorothioate linkage
  modified_base 21..22: mod_base = OTHER; note = phosphorothioate linkage
  modified_base 22..23: mod_base = OTHER; note = phosphorothioate linkage
  source 1..23: mol_type = other RNA
gtcgacagtgaagcggacttggg

SEQ ID NO: 439 - RNA, 23 nt, synthetic construct
  misc_feature 1..23: note = siRNA sequence name:ETXS386
  modified_base 1: mod_base = OTHER; note = 2'O-methyl-cytidine
  modified_base 2: mod_base = OTHER; note = 2'Fluoro-adenosine
  modified_base 3: mod_base = OTHER; note = 2'O-methyl-adenosine
  modified_base 4: mod_base = OTHER; note = 2'O-methyl-uridine
  modified_base 5: mod_base = OTHER; note = 2'O-methyl-uridine
  modified_base 6: mod_base = OTHER; note = 2'Fluoro-adenosine
  modified_base 7: mod_base = OTHER; note = 2'O-methyl-guanosine
  modified_base 8: mod_base = OTHER; note = 2' Fluoro-cytidine
  modified_base 9: mod_base = OTHER; note = 2'Fluoro-adenosine
  modified_base 10: mod_base = OTHER; note = 2'O-methyl-uridine
  modified_base 11: mod_base = OTHER; note = 2'O-methyl-guanosine
  modified_base 12: mod_base = OTHER; note = 2'O-methyl-cytidine
  modified_base 13: mod_base = OTHER; note = 2'O-methyl-uridine
  modified_base 14: mod_base = OTHER; note = 2' Fluoro-guanosine
  modified_base 15: mod_base = OTHER; note = 2'O-methyl-adenosine
  modified_base 16: mod_base = OTHER; note = 2' Fluoro-uridine
  modified_base 17: mod_base = OTHER; note = 2'O-methyl-guanosine
  modified_base 18: mod_base = OTHER; note = 2'O-methyl-cytidine
  modified_base 19: mod_base = OTHER; note = 2'O-methyl-cytidine
  modified_base 20: mod_base = OTHER; note = 2'O-methyl-cytidine
  modified_base 21: mod_base = OTHER; note = 2'O-methyl-cytidine
  modified_base 22: mod_base = OTHER; note = 2'O-methyl-cytidine
  modified_base 23: mod_base = OTHER; note = 2'O-methyl-cytidine
  modified_base 1..2: mod_base = OTHER; note = phosphorothioate linkage
  modified_base 2..3: mod_base = OTHER; note = phosphorothioate linkage
  modified_base 21..22: mod_base = OTHER; note = phosphorothioate linkage
  modified_base 22..23: mod_base = OTHER; note = phosphorothioate linkage
  source 1..23: mol_type = other RNA
caattagcatgctgatgcccccc

SEQ ID NO: 440 - RNA, 23 nt, synthetic construct
  misc_feature 1..23: note = siRNA sequence name:ETXS388
  modified_base 1: mod_base = OTHER; note = 2'O-methyl-guanosine
  modified_base 2: mod_base = OTHER; note = 2' Fluoro-guanosine
  modified_base 3: mod_base = OTHER; note = 2'O-methyl-guanosine
  modified_base 4: mod_base = OTHER; note = 2'O-methyl-cytidine
  modified_base 5: mod_base = OTHER; note = 2'O-methyl-cytidine
  modified_base 6: mod_base = OTHER; note = 2' Fluoro-uridine
  modified_base 7: mod_base = OTHER; note = 2'O-methyl-cytidine
  modified_base 8: mod_base = OTHER; note = 2'Fluoro-adenosine
  modified_base 9: mod_base = OTHER; note = 2' Fluoro-guanosine
  modified_base 10: mod_base = OTHER; note = 2'O-methyl-cytidine
  modified_base 11: mod_base = OTHER; note = 2'O-methyl-adenosine
  modified_base 12: mod_base = OTHER; note = 2'O-methyl-adenosine
  modified_base 13: mod_base = OTHER; note = 2'O-methyl-adenosine
  modified_base 14: mod_base = OTHER; note = 2' Fluoro-guanosine
  modified_base 15: mod_base = OTHER; note = 2'O-methyl-uridine
  modified_base 16: mod_base = OTHER; note = 2'Fluoro-adenosine
  modified_base 17: mod_base = OTHER; note = 2'O-methyl-adenosine
  modified_base 18: mod_base = OTHER; note = 2'O-methyl-uridine
  modified_base 19: mod_base = OTHER; note = 2'O-methyl-adenosine
  modified_base 20: mod_base = OTHER; note = 2'O-methyl-cytidine
  modified_base 21: mod_base = OTHER; note = 2'O-methyl-uridine
  modified_base 22: mod_base = OTHER; note = 2'O-methyl-cytidine
  modified_base 23: mod_base = OTHER; note = 2'O-methyl-uridine
  modified_base 1..2: mod_base = OTHER; note = phosphorothioate linkage
  modified_base 2..3: mod_base = OTHER; note = phosphorothioate linkage
  modified_base 21..22: mod_base = OTHER; note = phosphorothioate linkage
  modified_base 22..23: mod_base = OTHER; note = phosphorothioate linkage
  source 1..23: mol_type = other RNA
gggcctcagcaaagtaatactct

SEQ ID NO: 441 - RNA, 23 nt, synthetic construct
  misc_feature 1..23: note = siRNA sequence name:ETXS390
  modified_base 1: mod_base = OTHER; note = 2'O-methyl-guanosine
  modified_base 2: mod_base = OTHER; note = 2'Fluoro-adenosine
  modified_base 3: mod_base = OTHER; note = 2'O-methyl-cytidine
  modified_base 4: mod_base = OTHER; note = 2'O-methyl-adenosine
  modified_base 5: mod_base = OTHER; note = 2'O-methyl-guanosine
  modified_base 6: mod_base = OTHER; note = 2' Fluoro-cytidine
  modified_base 7: mod_base = OTHER; note = 2'O-methyl-guanosine
  modified_base 8: mod_base = OTHER; note = 2' Fluoro-guanosine
  modified_base 9: mod_base = OTHER; note = 2' Fluoro-cytidine
  modified_base 10: mod_base = OTHER; note = 2'O-methyl-adenosine
  modified_base 11: mod_base = OTHER; note = 2'O-methyl-uridine
  modified_base 12: mod_base = OTHER; note = 2'O-methyl-guanosine
  modified_base 13: mod_base = OTHER; note = 2'O-methyl-adenosine
  modified_base 14: mod_base = OTHER; note = 2'Fluoro-adenosine
  modified_base 15: mod_base = OTHER; note = 2'O-methyl-cytidine
  modified_base 16: mod_base = OTHER; note = 2' Fluoro-cytidine
  modified_base 17: mod_base = OTHER; note = 2'O-methyl-cytidine
  modified_base 18: mod_base = OTHER; note = 2'O-methyl-cytidine
  modified_base 19: mod_base = OTHER; note = 2'O-methyl-adenosine
  modified_base 20: mod_base = OTHER; note = 2'O-methyl-cytidine
  modified_base 21: mod_base = OTHER; note = 2'O-methyl-cytidine
  modified_base 22: mod_base = OTHER; note = 2'O-methyl-guanosine
  modified_base 23: mod_base = OTHER; note = 2'O-methyl-uridine
  modified_base 1..2: mod_base = OTHER; note = phosphorothioate linkage
  modified_base 2..3: mod_base = OTHER; note = phosphorothioate linkage
  modified_base 21..22: mod_base = OTHER; note = phosphorothioate linkage
  modified_base 22..23: mod_base = OTHER; note = phosphorothioate linkage
  source 1..23: mol_type = other RNA
gacagcggcatgaaccccaccgt

SEQ ID NO: 442 - RNA, 23 nt, synthetic construct
  misc_feature 1..23: note = siRNA sequence name:ETXS392
  modified_base 1: mod_base = OTHER; note = 2'O-methyl-cytidine
  modified_base 2: mod_base = OTHER; note = 2'Fluoro-adenosine
  modified_base 3: mod_base = OTHER; note = 2'O-methyl-uridine
  modified_base 4: mod_base = OTHER; note = 2'O-methyl-guanosine
  modified_base 5: mod_base = OTHER; note = 2'O-methyl-adenosine
  modified_base 6: mod_base = OTHER; note = 2'Fluoro-adenosine
  modified_base 7: mod_base = OTHER; note = 2'O-methyl-guanosine
  modified_base 8: mod_base = OTHER; note = 2'Fluoro-adenosine
  modified_base 9: mod_base = OTHER; note = 2' Fluoro-guanosine
  modified_base 10: mod_base = OTHER; note = 2'O-methyl-cytidine
  modified_base 11: mod_base = OTHER; note = 2'O-methyl-adenosine
  modified_base 12: mod_base = OTHER; note = 2'O-methyl-guanosine
  modified_base 13: mod_base = OTHER; note = 2'O-methyl-guanosine
  modified_base 14: mod_base = OTHER; note = 2' Fluoro-cytidine
  modified_base 15: mod_base = OTHER; note = 2'O-methyl-adenosine
  modified_base 16: mod_base = OTHER; note = 2' Fluoro-guanosine
  modified_base 17: mod_base = OTHER; note = 2'O-methyl-cytidine
  modified_base 18: mod_base = OTHER; note = 2'O-methyl-uridine
  modified_base 19: mod_base = OTHER; note = 2'O-methyl-guanosine
  modified_base 20: mod_base = OTHER; note = 2'O-methyl-guanosine
  modified_base 21: mod_base = OTHER; note = 2'O-methyl-uridine
  modified_base 22: mod_base = OTHER; note = 2'O-methyl-guanosine
  modified_base 23: mod_base = OTHER; note = 2'O-methyl-cytidine
  modified_base 1..2: mod_base = OTHER; note = phosphorothioate linkage
  modified_base 2..3: mod_base = OTHER; note = phosphorothioate linkage
  modified_base 21..22: mod_base = OTHER; note = phosphorothioate linkage
  modified_base 22..23: mod_base = OTHER; note = phosphorothioate linkage
  source 1..23: mol_type = other RNA
catgaagagcaggcagctggtgc

SEQ ID NO: 443 - RNA, 23 nt, synthetic construct
  misc_feature 1..23: note = siRNA sequence name:ETXS394
  modified_base 1: mod_base = OTHER; note = 2'O-methyl-cytidine
  modified_base 2: mod_base = OTHER; note = 2'Fluoro-adenosine
  modified_base 3: mod_base = OTHER; note = 2'O-methyl-cytidine
  modified_base 4: mod_base = OTHER; note = 2'O-methyl-uridine
  modified_base 5: mod_base = OTHER; note = 2'O-methyl-guanosine
  modified_base 6: mod_base = OTHER; note = 2' Fluoro-guanosine
  modified_base 7: mod_base = OTHER; note = 2'O-methyl-guanosine
  modified_base 8: mod_base = OTHER; note = 2'Fluoro-adenosine
  modified_base 9: mod_base = OTHER; note = 2'Fluoro-adenosine
  modified_base 10: mod_base = OTHER; note = 2'O-methyl-uridine
  modified_base 11: mod_base = OTHER; note = 2'O-methyl-uridine
  modified_base 12: mod_base = OTHER; note = 2'O-methyl-uridine
  modified_base 13: mod_base = OTHER; note = 2'O-methyl-adenosine
  modified_base 14: mod_base = OTHER; note = 2' Fluoro-uridine
  modified_base 15: mod_base = OTHER; note = 2'O-methyl-uridine
  modified_base 16: mod_base = OTHER; note = 2' Fluoro-cytidine
  modified_base 17: mod_base = OTHER; note = 2'O-methyl-adenosine
  modified_base 18: mod_base = OTHER; note = 2'O-methyl-cytidine
  modified_base 19: mod_base = OTHER; note = 2'O-methyl-cytidine
  modified_base 20: mod_base = OTHER; note = 2'O-methyl-cytidine
  modified_base 21: mod_base = OTHER; note = 2'O-methyl-adenosine
  modified_base 22: mod_base = OTHER; note = 2'O-methyl-guanosine
  modified_base 23: mod_base = OTHER; note = 2'O-methyl-guanosine
  modified_base 1..2: mod_base = OTHER; note = phosphorothioate linkage
  modified_base 2..3: mod_base = OTHER; note = phosphorothioate linkage
  modified_base 21..22: mod_base = OTHER; note = phosphorothioate linkage
  modified_base 22..23: mod_base = OTHER; note = phosphorothioate linkage
  source 1..23: mol_type = other RNA
cactgggaatttattcacccagg

SEQ ID NO: 444 - RNA, 23 nt, synthetic construct
  misc_feature 1..23: note = siRNA sequence name:ETXS396
  modified_base 1: mod_base = OTHER; note = 2'O-methyl-uridine
  modified_base 2: mod_base = OTHER; note = 2' Fluoro-uridine
  modified_base 3: mod_base = OTHER; note = 2'O-methyl-cytidine
  modified_base 4: mod_base = OTHER; note = 2'O-methyl-uridine
  modified_base 5: mod_base = OTHER; note = 2'O-methyl-guanosine
  modified_base 6: mod_base = OTHER; note = 2' Fluoro-uridine
  modified_base 7: mod_base = OTHER; note = 2'O-methyl-uridine
  modified_base 8: mod_base = OTHER; note = 2' Fluoro-uridine
  modified_base 9: mod_base = OTHER; note = 2' Fluoro-guanosine
  modified_base 10: mod_base = OTHER; note = 2'O-methyl-uridine
  modified_base 11: mod_base = OTHER; note = 2'O-methyl-cytidine
  modified_base 12: mod_base = OTHER; note = 2'O-methyl-adenosine
  modified_base 13: mod_base = OTHER; note = 2'O-methyl-uridine
  modified_base 14: mod_base = OTHER; note = 2' Fluoro-guanosine
  modified_base 15: mod_base = OTHER; note = 2'O-methyl-cytidine
  modified_base 16: mod_base = OTHER; note = 2' Fluoro-uridine
  modified_base 17: mod_base = OTHER; note = 2'O-methyl-uridine
  modified_base 18: mod_base = OTHER; note = 2'O-methyl-uridine
  modified_base 19: mod_base = OTHER; note = 2'O-methyl-uridine
  modified_base 20: mod_base = OTHER; note = 2'O-methyl-uridine
  modified_base 21: mod_base = OTHER; note = 2'O-methyl-uridine
  modified_base 22: mod_base = OTHER; note = 2'O-methyl-guanosine
  modified_base 23: mod_base = OTHER; note = 2'O-methyl-cytidine
  modified_base 1..2: mod_base = OTHER; note = phosphorothioate linkage
  modified_base 2..3: mod_base = OTHER; note = phosphorothioate linkage
  modified_base 21..22: mod_base = OTHER; note = phosphorothioate linkage
  modified_base 22..23: mod_base = OTHER; note = phosphorothioate linkage
  source 1..23: mol_type = other RNA
ttctgtttgtcatgcttttttgc

SEQ ID NO: 445 - RNA, 23 nt, synthetic construct
  misc_feature 1..23: note = siRNA sequence name:ETXS398
  modified_base 1: mod_base = OTHER; note = 2'O-methyl-uridine
  modified_base 2: mod_base = OTHER; note = 2' Fluoro-cytidine
  modified_base 3: mod_base = OTHER; note = 2'O-methyl-guanosine
  modified_base 4: mod_base = OTHER; note = 2'O-methyl-adenosine
  modified_base 5: mod_base = OTHER; note = 2'O-methyl-cytidine
  modified_base 6: mod_base = OTHER; note = 2'Fluoro-adenosine
  modified_base 7: mod_base = OTHER; note = 2'O-methyl-guanosine
  modified_base 8: mod_base = OTHER; note = 2' Fluoro-uridine
  modified_base 9: mod_base = OTHER; note = 2' Fluoro-guanosine
  modified_base 10: mod_base = OTHER; note = 2'O-methyl-adenosine
  modified_base 11: mod_base = OTHER; note = 2'O-methyl-adenosine
  modified_base 12: mod_base = OTHER; note = 2'O-methyl-guanosine
  modified_base 13: mod_base = OTHER; note = 2'O-methyl-cytidine
  modified_base 14: mod_base = OTHER; note = 2' Fluoro-guanosine
  modified_base 15: mod_base = OTHER; note = 2'O-methyl-guanosine
  modified_base 16: mod_base = OTHER; note = 2'Fluoro-adenosine
  modified_base 17: mod_base = OTHER; note = 2'O-methyl-cytidine
  modified_base 18: mod_base = OTHER; note = 2'O-methyl-uridine
  modified_base 19: mod_base = OTHER; note = 2'O-methyl-uridine
  modified_base 20: mod_base = OTHER; note = 2'O-methyl-guanosine
  modified_base 21: mod_base = OTHER; note = 2'O-methyl-guanosine
  modified_base 22: mod_base = OTHER; note = 2'O-methyl-guanosine
  modified_base 23: mod_base = OTHER; note = 2'O-methyl-uridine
  modified_base 1..2: mod_base = OTHER; note = phosphorothioate linkage
  modified_base 2..3: mod_base = OTHER; note = phosphorothioate linkage
  modified_base 21..22: mod_base = OTHER; note = phosphorothioate linkage
  modified_base 22..23: mod_base = OTHER; note = phosphorothioate linkage
  source 1..23: mol_type = other RNA
tcgacagtgaagcggacttgggt

SEQ ID NO: 446 - RNA, 23 nt, synthetic construct
  misc_feature 1..23: note = siRNA sequence name:ETXS400
  modified_base 1: mod_base = OTHER; note = 2'O-methyl-adenosine
  modified_base 2: mod_base = OTHER; note = 2'Fluoro-adenosine
  modified_base 3: mod_base = OTHER; note = 2'O-methyl-guanosine
  modified_base 4: mod_base = OTHER; note = 2'O-methyl-adenosine
  modified_base 5: mod_base = OTHER; note = 2'O-methyl-cytidine
  modified_base 6: mod_base = OTHER; note = 2' Fluoro-guanosine
  modified_base 7: mod_base = OTHER; note = 2'O-methyl-cytidine
  modified_base 8: mod_base = OTHER; note = 2' Fluoro-uridine
  modified_base 9: mod_base = OTHER; note = 2' Fluoro-guanosine
  modified_base 10: mod_base = OTHER; note = 2'O-methyl-guanosine
  modified_base 11: mod_base = OTHER; note = 2'O-methyl-adenosine
  modified_base 12: mod_base = OTHER; note = 2'O-methyl-uridine
  modified_base 13: mod_base = OTHER; note = 2'O-methyl-cytidine
  modified_base 14: mod_base = OTHER; note = 2' Fluoro-cytidine
  modified_base 15: mod_base = OTHER; note = 2'O-methyl-guanosine
  modified_base 16: mod_base = OTHER; note = 2' Fluoro-guanosine
  modified_base 17: mod_base = OTHER; note = 2'O-methyl-cytidine
  modified_base 18: mod_base = OTHER; note = 2'O-methyl-uridine
  modified_base 19: mod_base = OTHER; note = 2'O-methyl-cytidine
  modified_base 20: mod_base = OTHER; note = 2'O-methyl-uridine
  modified_base 21: mod_base = OTHER; note = 2'O-methyl-uridine
  modified_base 22: mod_base = OTHER; note = 2'O-methyl-guanosine
  modified_base 23: mod_base = OTHER; note = 2'O-methyl-cytidine
  modified_base 1..2: mod_base = OTHER; note = phosphorothioate linkage
  modified_base 2..3: mod_base = OTHER; note = phosphorothioate linkage
  modified_base 21..22: mod_base = OTHER; note = phosphorothioate linkage
  modified_base 22..23: mod_base = OTHER; note = phosphorothioate linkage
  source 1..23: mol_type = other RNA
aagacgctggatccggctcttgc

SEQ ID NO: 447 - RNA, 23 nt, synthetic construct
  misc_feature 1..23: note = siRNA sequence name:ETXS402
  modified_base 1: mod_base = OTHER; note = 2'O-methyl-adenosine
  modified_base 2: mod_base = OTHER; note = 2' Fluoro-guanosine
  modified_base 3: mod_base = OTHER; note = 2'O-methyl-uridine
  modified_base 4: mod_base = OTHER; note = 2'O-methyl-uridine
  modified_base 5: mod_base = OTHER; note = 2'O-methyl-cytidine
  modified_base 6: mod_base = OTHER; note = 2' Fluoro-uridine
  modified_base 7: mod_base = OTHER; note = 2'O-methyl-guanosine
  modified_base 8: mod_base = OTHER; note = 2' Fluoro-uridine
  modified_base 9: mod_base = OTHER; note = 2' Fluoro-uridine
  modified_base 10: mod_base = OTHER; note = 2'O-methyl-uridine
  modified_base 11: mod_base = OTHER; note = 2'O-methyl-guanosine
  modified_base 12: mod_base = OTHER; note = 2'O-methyl-uridine
  modified_base 13: mod_base = OTHER; note = 2'O-methyl-cytidine
  modified_base 14: mod_base = OTHER; note = 2'Fluoro-adenosine
  modified_base 15: mod_base = OTHER; note = 2'O-methyl-uridine
  modified_base 16: mod_base = OTHER; note = 2' Fluoro-guanosine
  modified_base 17: mod_base = OTHER; note = 2'O-methyl-cytidine
  modified_base 18: mod_base = OTHER; note = 2'O-methyl-uridine
  modified_base 19: mod_base = OTHER; note = 2'O-methyl-uridine
  modified_base 20: mod_base = OTHER; note = 2'O-methyl-uridine
  modified_base 21: mod_base = OTHER; note = 2'O-methyl-uridine
  modified_base 22: mod_base = OTHER; note = 2'O-methyl-uridine
  modified_base 23: mod_base = OTHER; note = 2'O-methyl-uridine
  modified_base 1..2: mod_base = OTHER; note = phosphorothioate linkage
  modified_base 2..3: mod_base = OTHER; note = phosphorothioate linkage
  modified_base 21..22: mod_base = OTHER; note = phosphorothioate linkage
  modified_base 22..23: mod_base = OTHER; note = phosphorothioate linkage
  source 1..23: mol_type = other RNA
agttctgtttgtcatgctttttt

SEQ ID NO: 448 - RNA, 23 nt, synthetic construct
  misc_feature 1..23: note = siRNA sequence name:ETXS404
  modified_base 1: mod_base = OTHER; note = 2'O-methyl-cytidine
  modified_base 2: mod_base = OTHER; note = 2' Fluoro-uridine
  modified_base 3: mod_base = OTHER; note = 2'O-methyl-uridine
  modified_base 4: mod_base = OTHER; note = 2'O-methyl-guanosine
  modified_base 5: mod_base = OTHER; note = 2'O-methyl-guanosine
  modified_base 6: mod_base = OTHER; note = 2' Fluoro-guanosine
  modified_base 7: mod_base = OTHER; note = 2'O-methyl-uridine
  modified_base 8: mod_base = OTHER; note = 2' Fluoro-guanosine
  modified_base 9: mod_base = OTHER; note = 2' Fluoro-guanosine
  modified_base 10: mod_base = OTHER; note = 2'O-methyl-adenosine
  modified_base 11: mod_base = OTHER; note = 2'O-methyl-cytidine
  modified_base 12: mod_base = OTHER; note = 2'O-methyl-adenosine
  modified_base 13: mod_base = OTHER; note = 2'O-methyl-guanosine
  modified_base 14: mod_base = OTHER; note = 2' Fluoro-cytidine
  modified_base 15: mod_base = OTHER; note = 2'O-methyl-guanosine
  modified_base 16: mod_base = OTHER; note = 2' Fluoro-guanosine
  modified_base 17: mod_base = OTHER; note = 2'O-methyl-cytidine
  modified_base 18: mod_base = OTHER; note = 2'O-methyl-adenosine
  modified_base 19: mod_base = OTHER; note = 2'O-methyl-uridine
  modified_base 20: mod_base = OTHER; note = 2'O-methyl-guanosine
  modified_base 21: mod_base = OTHER; note = 2'O-methyl-adenosine
  modified_base 22: mod_base = OTHER; note = 2'O-methyl-adenosine
  modified_base 23: mod_base = OTHER; note = 2'O-methyl-cytidine
  modified_base 1..2: mod_base = OTHER; note = phosphorothioate linkage
  modified_base 2..3: mod_base = OTHER; note = phosphorothioate linkage
  modified_base 21..22: mod_base = OTHER; note = phosphorothioate linkage
  modified_base 22..23: mod_base = OTHER; note = phosphorothioate linkage
  source 1..23: mol_type = other RNA
cttgggtggacagcggcatgaac

SEQ ID NO: 449 - RNA, 23 nt, synthetic construct
  misc_feature 1..23: note = siRNA sequence name:ETXS406
  modified_base 1: mod_base = OTHER; note = 2'O-methyl-uridine
  modified_base 2: mod_base = OTHER; note = 2' Fluoro-cytidine
  modified_base 3: mod_base = OTHER; note = 2'O-methyl-guanosine
  modified_base 4: mod_base = OTHER; note = 2'O-methyl-adenosine
  modified_base 5: mod_base = OTHER; note = 2'O-methyl-guanosine
  modified_base 6: mod_base = OTHER; note = 2' Fluoro-uridine
  modified_base 7: mod_base = OTHER; note = 2'O-methyl-uridine
  modified_base 8: mod_base = OTHER; note = 2' Fluoro-cytidine
  modified_base 9: mod_base = OTHER; note = 2' Fluoro-uridine
  modified_base 10: mod_base = OTHER; note = 2'O-methyl-guanosine
  modified_base 11: mod_base = OTHER; note = 2'O-methyl-uridine
  modified_base 12: mod_base = OTHER; note = 2'O-methyl-uridine
  modified_base 13: mod_base = OTHER; note = 2'O-methyl-uridine
  modified_base 14: mod_base = OTHER; note = 2' Fluoro-guanosine
  modified_base 15: mod_base = OTHER; note = 2'O-methyl-uridine
  modified_base 16: mod_base = OTHER; note = 2' Fluoro-cytidine
  modified_base 17: mod_base = OTHER; note = 2'O-methyl-adenosine
  modified_base 18: mod_base = OTHER; note = 2'O-methyl-uridine
  modified_base 19: mod_base = OTHER; note = 2'O-methyl-guanosine
  modified_base 20: mod_base = OTHER; note = 2'O-methyl-cytidine
  modified_base 21: mod_base = OTHER; note = 2'O-methyl-uridine
  modified_base 22: mod_base = OTHER; note = 2'O-methyl-uridine
  modified_base 23: mod_base = OTHER; note = 2'O-methyl-uridine
  modified_base 1..2: mod_base = OTHER; note = phosphorothioate linkage
  modified_base 2..3: mod_base = OTHER; note = phosphorothioate linkage
  modified_base 21..22: mod_base = OTHER; note = phosphorothioate linkage
  modified_base 22..23: mod_base = OTHER; note = phosphorothioate linkage
  source 1..23: mol_type = other RNA
tcgagttctgtttgtcatgcttt

SEQ ID NO: 450 - RNA, 23 nt, synthetic construct
  misc_feature 1..23: note = siRNA sequence name:ETXS408
  modified_base 1: mod_base = OTHER; note = 2'O-methyl-guanosine
  modified_base 2: mod_base = OTHER; note = 2' Fluoro-cytidine
  modified_base 3: mod_base = OTHER; note = 2'O-methyl-cytidine
  modified_base 4: mod_base = OTHER; note = 2'O-methyl-guanosine
  modified_base 5: mod_base = OTHER; note = 2'O-methyl-guanosine
  modified_base 6: mod_base = OTHER; note = 2'Fluoro-adenosine
  modified_base 7: mod_base = OTHER; note = 2'O-methyl-adenosine
  modified_base 8: mod_base = OTHER; note = 2' Fluoro-guanosine
  modified_base 9: mod_base = OTHER; note = 2' Fluoro-uridine
  modified_base 10: mod_base = OTHER; note = 2'O-methyl-uridine
  modified_base 11: mod_base = OTHER; note = 2'O-methyl-guanosine
  modified_base 12: mod_base = OTHER; note = 2'O-methyl-uridine
  modified_base 13: mod_base = OTHER; note = 2'O-methyl-guanosine
  modified_base 14: mod_base = OTHER; note = 2' Fluoro-guanosine
  modified_base 15: mod_base = OTHER; note = 2'O-methyl-uridine
  modified_base 16: mod_base = OTHER; note = 2' Fluoro-uridine
  modified_base 17: mod_base = OTHER; note = 2'O-methyl-guanosine
  modified_base 18: mod_base = OTHER; note = 2'O-methyl-uridine
  modified_base 19: mod_base = OTHER; note = 2'O-methyl-guanosine
  modified_base 20: mod_base = OTHER; note = 2'O-methyl-uridine
  modified_base 21: mod_base = OTHER; note = 2'O-methyl-guanosine
  modified_base 22: mod_base = OTHER; note = 2'O-methyl-uridine
  modified_base 23: mod_base = OTHER; note = 2'O-methyl-cytidine
  modified_base 1..2: mod_base = OTHER; note = phosphorothioate linkage
  modified_base 2..3: mod_base = OTHER; note = phosphorothioate linkage
  modified_base 21..22: mod_base = OTHER; note = phosphorothioate linkage
  modified_base 22..23: mod_base = OTHER; note = phosphorothioate linkage
  source 1..23: mol_type = other RNA
gccggaagttgtggttgtgtgtc

SEQ ID NO: 451 - RNA, 23 nt, synthetic construct
  misc_feature 1..23: note = siRNA sequence name:ETXS410
  modified_base 1: mod_base = OTHER; note = 2'O-methyl-cytidine
  modified_base 2: mod_base = OTHER; note = 2'Fluoro-adenosine
  modified_base 3: mod_base = OTHER; note = 2'O-methyl-guanosine
  modified_base 4: mod_base = OTHER; note = 2'O-methyl-cytidine
  modified_base 5: mod_base = OTHER; note = 2'O-methyl-cytidine
  modified_base 6: mod_base = OTHER; note = 2' Fluoro-guanosine
  modified_base 7: mod_base = OTHER; note = 2'O-methyl-guanosine
  modified_base 8: mod_base = OTHER; note = 2'Fluoro-adenosine
  modified_base 9: mod_base = OTHER; note = 2'Fluoro-adenosine
  modified_base 10: mod_base = OTHER; note = 2'O-methyl-guanosine
  modified_base 11: mod_base = OTHER; note = 2'O-methyl-uridine
  modified_base 12: mod_base = OTHER; note = 2'O-methyl-uridine
  modified_base 13: mod_base = OTHER; note = 2'O-methyl-guanosine
  modified_base 14: mod_base = OTHER; note = 2' Fluoro-uridine
  modified_base 15: mod_base = OTHER; note = 2'O-methyl-guanosine
  modified_base 16: mod_base = OTHER; note = 2' Fluoro-guanosine
  modified_base 17: mod_base = OTHER; note = 2'O-methyl-uridine
  modified_base 18: mod_base = OTHER; note = 2'O-methyl-uridine
  modified_base 19: mod_base = OTHER; note = 2'O-methyl-guanosine
  modified_base 20: mod_base = OTHER; note = 2'O-methyl-uridine
  modified_base 21: mod_base = OTHER; note = 2'O-methyl-guanosine
  modified_base 22: mod_base = OTHER; note = 2'O-methyl-uridine
  modified_base 23: mod_base = OTHER; note = 2'O-methyl-guanosine
  modified_base 1..2: mod_base = OTHER; note = phosphorothioate linkage
  modified_base 2..3: mod_base = OTHER; note = phosphorothioate linkage
  modified_base 21..22: mod_base = OTHER; note = phosphorothioate linkage
  modified_base 22..23: mod_base = OTHER; note = phosphorothioate linkage
  source 1..23: mol_type = other RNA
cagccggaagttgtggttgtgtg

SEQ ID NO: 452 - RNA, 23 nt, synthetic construct
  misc_feature 1..23: note = siRNA sequence name:ETXS412
  modified_base 1: mod_base = OTHER; note = 2'O-methyl-uridine
  modified_base 2: mod_base = OTHER; note = 2'Fluoro-adenosine
  modified_base 3: mod_base = OTHER; note = 2'O-methyl-adenosine
  modified_base 4: mod_base = OTHER; note = 2'O-methyl-guanosine
  modified_base 5: mod_base = OTHER; note = 2'O-methyl-adenosine
  modified_base 6: mod_base = OTHER; note = 2' Fluoro-cytidine
  modified_base 7: mod_base = OTHER; note = 2'O-methyl-guanosine
  modified_base 8: mod_base = OTHER; note = 2' Fluoro-cytidine
  modified_base 9: mod_base = OTHER; note = 2' Fluoro-uridine
  modified_base 10: mod_base = OTHER; note = 2'O-methyl-guanosine
  modified_base 11: mod_base = OTHER; note = 2'O-methyl-guanosine
  modified_base 12: mod_base = OTHER; note = 2'O-methyl-adenosine
  modified_base 13: mod_base = OTHER; note = 2'O-methyl-uridine
  modified_base 14: mod_base = OTHER; note = 2' Fluoro-cytidine
  modified_base 15: mod_base = OTHER; note = 2'O-methyl-cytidine
  modified_base 16: mod_base = OTHER; note = 2' Fluoro-guanosine
  modified_base 17: mod_base = OTHER; note = 2'O-methyl-guanosine
  modified_base 18: mod_base = OTHER; note = 2'O-methyl-cytidine
  modified_base 19: mod_base = OTHER; note = 2'O-methyl-uridine
  modified_base 20: mod_base = OTHER; note = 2'O-methyl-cytidine
  modified_base 21: mod_base = OTHER; note = 2'O-methyl-uridine
  modified_base 22: mod_base = OTHER; note = 2'O-methyl-uridine
  modified_base 23: mod_base = OTHER; note = 2'O-methyl-guanosine
  modified_base 1..2: mod_base = OTHER; note = phosphorothioate linkage
  modified_base 2..3: mod_base = OTHER; note = phosphorothioate linkage
  modified_base 21..22: mod_base = OTHER; note = phosphorothioate linkage
  modified_base 22..23: mod_base = OTHER; note = phosphorothioate linkage
  source 1..23: mol_type = other RNA
taagacgctggatccggctcttg

SEQ ID NO: 453 - RNA, 23 nt, synthetic construct
  misc_feature 1..23: note = siRNA sequence name:ETXS414
  modified_base 1: mod_base = OTHER; note = 2'O-methyl-uridine
  modified_base 2: mod_base = OTHER; note = 2' Fluoro-cytidine
  modified_base 3: mod_base = OTHER; note = 2'O-methyl-adenosine
  modified_base 4: mod_base = OTHER; note = 2'O-methyl-guanosine
  modified_base 5: mod_base = OTHER; note = 2'O-methyl-cytidine
  modified_base 6: mod_base = OTHER; note = 2' Fluoro-cytidine
  modified_base 7: mod_base = OTHER; note = 2'O-methyl-guanosine
  modified_base 8: mod_base = OTHER; note = 2' Fluoro-guanosine
  modified_base 9: mod_base = OTHER; note = 2'Fluoro-adenosine
  modified_base 10: mod_base = OTHER; note = 2'O-methyl-adenosine
  modified_base 11: mod_base = OTHER; note = 2'O-methyl-guanosine
  modified_base 12: mod_base = OTHER; note = 2'O-methyl-uridine
  modified_base 13: mod_base = OTHER; note = 2'O-methyl-uridine
  modified_base 14: mod_base = OTHER; note = 2' Fluoro-guanosine
  modified_base 15: mod_base = OTHER; note = 2'O-methyl-uridine
  modified_base 16: mod_base = OTHER; note = 2' Fluoro-guanosine
  modified_base 17: mod_base = OTHER; note = 2'O-methyl-guanosine
  modified_base 18: mod_base = OTHER; note = 2'O-methyl-uridine
  modified_base 19: mod_base = OTHER; note = 2'O-methyl-uridine
  modified_base 20: mod_base = OTHER; note = 2'O-methyl-guanosine
  modified_base 21: mod_base = OTHER; note = 2'O-methyl-uridine
  modified_base 22: mod_base = OTHER; note = 2'O-methyl-guanosine
  modified_base 23: mod_base = OTHER; note = 2'O-methyl-uridine
  modified_base 1..2: mod_base = OTHER; note = phosphorothioate linkage
  modified_base 2..3: mod_base = OTHER; note = phosphorothioate linkage
  modified_base 21..22: mod_base = OTHER; note = phosphorothioate linkage
  modified_base 22..23: mod_base = OTHER; note = phosphorothioate linkage
  source 1..23: mol_type = other RNA
tcagccggaagttgtggttgtgt

SEQ ID NO: 454 - RNA, 23 nt, synthetic construct
  misc_feature 1..23: note = siRNA sequence name:ETXS416
  modified_base 1: mod_base = OTHER; note = 2'O-methyl-uridine
  modified_base 2: mod_base = OTHER; note = 2' Fluoro-uridine
  modified_base 3: mod_base = OTHER; note = 2'O-methyl-guanosine
  modified_base 4: mod_base = OTHER; note = 2'O-methyl-guanosine
  modified_base 5: mod_base = OTHER; note = 2'O-methyl-uridine
  modified_base 6: mod_base = OTHER; note = 2' Fluoro-guanosine
  modified_base 7: mod_base = OTHER; note = 2'O-methyl-cytidine
  modified_base 8: mod_base = OTHER; note = 2' Fluoro-uridine
  modified_base 9: mod_base = OTHER; note = 2' Fluoro-uridine
  modified_base 10: mod_base = OTHER; note = 2'O-methyl-guanosine
  modified_base 11: mod_base = OTHER; note = 2'O-methyl-adenosine
  modified_base 12: mod_base = OTHER; note = 2'O-methyl-adenosine
  modified_base 13: mod_base = OTHER; note = 2'O-methyl-cytidine
  modified_base 14: mod_base = OTHER; note = 2'Fluoro-adenosine
  modified_base 15: mod_base = OTHER; note = 2'O-methyl-guanosine
  modified_base 16: mod_base = OTHER; note = 2' Fluoro-guanosine
  modified_base 17: mod_base = OTHER; note = 2'O-methyl-uridine
  modified_base 18: mod_base = OTHER; note = 2'O-methyl-cytidine
  modified_base 19: mod_base = OTHER; note = 2'O-methyl-guanosine
  modified_base 20: mod_base = OTHER; note = 2'O-methyl-adenosine
  modified_base 21: mod_base = OTHER; note = 2'O-methyl-uridine
  modified_base 22: mod_base = OTHER; note = 2'O-methyl-guanosine
  modified_base 23: mod_base = OTHER; note = 2'O-methyl-guanosine
  modified_base 1..2: mod_base = OTHER; note = phosphorothioate linkage
  modified_base 2..3: mod_base = OTHER; note = phosphorothioate linkage
  modified_base 21..22: mod_base = OTHER; note = phosphorothioate linkage
  modified_base 22..23: mod_base = OTHER; note = phosphorothioate linkage
  source 1..23: mol_type = other RNA
ttggtgcttgaacaggtcgatgg

SEQ ID NO: 455 - RNA, 23 nt, synthetic construct
  misc_feature 1..23: note = siRNA sequence name:ETXS418
  modified_base 1: mod_base = OTHER; note = 2'O-methyl-uridine
  modified_base 2: mod_base = OTHER; note = 2' Fluoro-uridine
  modified_base 3: mod_base = OTHER; note = 2'O-methyl-uridine
  modified_base 4: mod_base = OTHER; note = 2'O-methyl-uridine
  modified_base 5: mod_base = OTHER; note = 2'O-methyl-guanosine
  modified_base 6: mod_base = OTHER; note = 2' Fluoro-cytidine
  modified_base 7: mod_base = OTHER; note = 2'O-methyl-cytidine
  modified_base 8: mod_base = OTHER; note = 2'Fluoro-adenosine
  modified_base 9: mod_base = OTHER; note = 2' Fluoro-uridine
  modified_base 10: mod_base = OTHER; note = 2'O-methyl-cytidine
  modified_base 11: mod_base = OTHER; note = 2'O-methyl-uridine
  modified_base 12: mod_base = OTHER; note = 2'O-methyl-cytidine
  modified_base 13: mod_base = OTHER; note = 2'O-methyl-uridine
  modified_base 14: mod_base = OTHER; note = 2' Fluoro-cytidine
  modified_base 15: mod_base = OTHER; note = 2'O-methyl-cytidine
  modified_base 16: mod_base = OTHER; note = 2'Fluoro-adenosine
  modified_base 17: mod_base = OTHER; note = 2'O-methyl-cytidine
  modified_base 18: mod_base = OTHER; note = 2'O-methyl-cytidine
  modified_base 19: mod_base = OTHER; note = 2'O-methyl-adenosine
  modified_base 20: mod_base = OTHER; note = 2'O-methyl-cytidine
  modified_base 21: mod_base = OTHER; note = 2'O-methyl-cytidine
  modified_base 22: mod_base = OTHER; note = 2'O-methyl-cytidine
  modified_base 23: mod_base = OTHER; note = 2'O-methyl-guanosine
  modified_base 1..2: mod_base = OTHER; note = phosphorothioate linkage
  modified_base 2..3: mod_base = OTHER; note = phosphorothioate linkage
  modified_base 21..22: mod_base = OTHER; note = phosphorothioate linkage
  modified_base 22..23: mod_base = OTHER; note = phosphorothioate linkage
  source 1..23: mol_type = other RNA
ttttgccatctctccaccacccg

SEQ ID NO: 456 - RNA, 23 nt, synthetic construct
  misc_feature 1..23: note = siRNA sequence name:ETXS420
  modified_base 1: mod_base = OTHER; note = 2'O-methyl-guanosine
  modified_base 2: mod_base = OTHER; note = 2'Fluoro-adenosine
  modified_base 3: mod_base = OTHER; note = 2'O-methyl-cytidine
  modified_base 4: mod_base = OTHER; note = 2'O-methyl-adenosine
  modified_base 5: mod_base = OTHER; note = 2'O-methyl-guanosine
  modified_base 6: mod_base = OTHER; note = 2' Fluoro-uridine
  modified_base 7: mod_base = OTHER; note = 2'O-methyl-guanosine
  modified_base 8: mod_base = OTHER; note = 2'Fluoro-adenosine
  modified_base 9: mod_base = OTHER; note = 2'Fluoro-adenosine
  modified_base 10: mod_base = OTHER; note = 2'O-methyl-guanosine
  modified_base 11: mod_base = OTHER; note = 2'O-methyl-cytidine
  modified_base 12: mod_base = OTHER; note = 2'O-methyl-guanosine
  modified_base 13: mod_base = OTHER; note = 2'O-methyl-guanosine
  modified_base 14: mod_base = OTHER; note = 2'Fluoro-adenosine
  modified_base 15: mod_base = OTHER; note = 2'O-methyl-cytidine
  modified_base 16: mod_base = OTHER; note = 2' Fluoro-uridine
  modified_base 17: mod_base = OTHER; note = 2'O-methyl-uridine
  modified_base 18: mod_base = OTHER; note = 2'O-methyl-guanosine
  modified_base 19: mod_base = OTHER; note = 2'O-methyl-guanosine
  modified_base 20: mod_base = OTHER; note = 2'O-methyl-guanosine
  modified_base 21: mod_base = OTHER; note = 2'O-methyl-uridine
  modified_base 22: mod_base = OTHER; note = 2'O-methyl-guanosine
  modified_base 23: mod_base = OTHER; note = 2'O-methyl-guanosine
  modified_base 1..2: mod_base = OTHER; note = phosphorothioate linkage
  modified_base 2..3: mod_base = OTHER; note = phosphorothioate linkage
  modified_base 21..22: mod_base = OTHER; note = phosphorothioate linkage
  modified_base 22..23: mod_base = OTHER; note = phosphorothioate linkage
  source 1..23: mol_type = other RNA
gacagtgaagcggacttgggtgg

SEQ ID NO: 457 - RNA, 23 nt, synthetic construct
  misc_feature 1..23: note = siRNA sequence name:ETXS422
  modified_base 1: mod_base = OTHER; note = 2'O-methyl-uridine
  modified_base 2: mod_base = OTHER; note = 2' Fluoro-cytidine
  modified_base 3: mod_base = OTHER; note = 2'O-methyl-uridine
  modified_base 4: mod_base = OTHER; note = 2'O-methyl-cytidine
  modified_base 5: mod_base = OTHER; note = 2'O-methyl-guanosine
  modified_base 6: mod_base = OTHER; note = 2'Fluoro-adenosine
  modified_base 7: mod_base = OTHER; note = 2'O-methyl-guanosine
  modified_base 8: mod_base = OTHER; note = 2' Fluoro-uridine
  modified_base 9: mod_base = OTHER; note = 2' Fluoro-uridine
  modified_base 10: mod_base = OTHER; note = 2'O-methyl-cytidine
  modified_base 11: mod_base = OTHER; note = 2'O-methyl-uridine
  modified_base 12: mod_base = OTHER; note = 2'O-methyl-guanosine
  modified_base 13: mod_base = OTHER; note = 2'O-methyl-uridine
  modified_base 14: mod_base = OTHER; note = 2' Fluoro-uridine
  modified_base 15: mod_base = OTHER; note = 2'O-methyl-uridine
  modified_base 16: mod_base = OTHER; note = 2' Fluoro-guanosine
  modified_base 17: mod_base = OTHER; note = 2'O-methyl-uridine
  modified_base 18: mod_base = OTHER; note = 2'O-methyl-cytidine
  modified_base 19: mod_base = OTHER; note = 2'O-methyl-adenosine
  modified_base 20: mod_base = OTHER; note = 2'O-methyl-uridine
  modified_base 21: mod_base = OTHER; note = 2'O-methyl-guanosine
  modified_base 22: mod_base = OTHER; note = 2'O-methyl-cytidine
  modified_base 23: mod_base = OTHER; note = 2'O-methyl-uridine
  modified_base 1..2: mod_base = OTHER; note = phosphorothioate linkage
  modified_base 2..3: mod_base = OTHER; note = phosphorothioate linkage
  modified_base 21..22: mod_base = OTHER; note = phosphorothioate linkage
  modified_base 22..23: mod_base = OTHER; note = phosphorothioate linkage
  source 1..23: mol_type = other RNA
tctcgagttctgtttgtcatgct

SEQ ID NO: 458 - RNA, 23 nt, synthetic construct
  misc_feature 1..23: note = siRNA sequence name:ETXS424
  modified_base 1: mod_base = OTHER; note = 2'O-methyl-uridine
  modified_base 2: mod_base = OTHER; note = 2' Fluoro-guanosine
  modified_base 3: mod_base = OTHER; note = 2'O-methyl-uridine
  modified_base 4: mod_base = OTHER; note = 2'O-methyl-uridine
  modified_base 5: mod_base = OTHER; note = 2'O-methyl-adenosine
  modified_base 6: mod_base = OTHER; note = 2'Fluoro-adenosine
  modified_base 7: mod_base = OTHER; note = 2'O-methyl-guanosine
  modified_base 8: mod_base = OTHER; note = 2'Fluoro-adenosine
  modified_base 9: mod_base = OTHER; note = 2' Fluoro-cytidine
  modified_base 10: mod_base = OTHER; note = 2'O-methyl-guanosine
  modified_base 11: mod_base = OTHER; note = 2'O-methyl-cytidine
  modified_base 12: mod_base = OTHER; note = 2'O-methyl-uridine
  modified_base 13: mod_base = OTHER; note = 2'O-methyl-guanosine
  modified_base 14: mod_base = OTHER; note = 2' Fluoro-guanosine
  modified_base 15: mod_base = OTHER; note = 2'O-methyl-adenosine
  modified_base 16: mod_base = OTHER; note = 2' Fluoro-uridine
  modified_base 17: mod_base = OTHER; note = 2'O-methyl-cytidine
  modified_base 18: mod_base = OTHER; note = 2'O-methyl-cytidine
  modified_base 19: mod_base = OTHER; note = 2'O-methyl-guanosine
  modified_base 20: mod_base = OTHER; note = 2'O-methyl-guanosine
  modified_base 21: mod_base = OTHER; note = 2'O-methyl-cytidine
  modified_base 22: mod_base = OTHER; note = 2'O-methyl-uridine
  modified_base 23: mod_base = OTHER; note = 2'O-methyl-cytidine
  modified_base 1..2: mod_base = OTHER; note = phosphorothioate linkage
  modified_base 2..3: mod_base = OTHER; note = phosphorothioate linkage
  modified_base 21..22: mod_base = OTHER; note = phosphorothioate linkage
  modified_base 22..23: mod_base = OTHER; note = phosphorothioate linkage
  source 1..23: mol_type = other RNA
tgttaagacgctggatccggctc

SEQ ID NO: 459 - RNA, 23 nt, synthetic construct
  misc_feature 1..23: note = siRNA sequence name:ETXS426
  modified_base 1: mod_base = OTHER; note = 2'O-methyl-guanosine
  modified_base 2: mod_base = OTHER; note = 2'Fluoro-adenosine
  modified_base 3: mod_base = OTHER; note = 2'O-methyl-cytidine
  modified_base 4: mod_base = OTHER; note = 2'O-methyl-guanosine
  modified_base 5: mod_base = OTHER; note = 2'O-methyl-cytidine
  modified_base 6: mod_base = OTHER; note = 2' Fluoro-uridine
  modified_base 7: mod_base = OTHER; note = 2'O-methyl-guanosine
  modified_base 8: mod_base = OTHER; note = 2' Fluoro-guanosine
  modified_base 9: mod_base = OTHER; note = 2'Fluoro-adenosine
  modified_base 10: mod_base = OTHER; note = 2'O-methyl-uridine
  modified_base 11: mod_base = OTHER; note = 2'O-methyl-cytidine
  modified_base 12: mod_base = OTHER; note = 2'O-methyl-cytidine
  modified_base 13: mod_base = OTHER; note = 2'O-methyl-guanosine
  modified_base 14: mod_base = OTHER; note = 2' Fluoro-guanosine
  modified_base 15: mod_base = OTHER; note = 2'O-methyl-cytidine
  modified_base 16: mod_base = OTHER; note = 2' Fluoro-uridine
  modified_base 17: mod_base = OTHER; note = 2'O-methyl-cytidine
  modified_base 18: mod_base = OTHER; note = 2'O-methyl-uridine
  modified_base 19: mod_base = OTHER; note = 2'O-methyl-uridine
  modified_base 20: mod_base = OTHER; note = 2'O-methyl-guanosine
  modified_base 21: mod_base = OTHER; note = 2'O-methyl-cytidine
  modified_base 22: mod_base = OTHER; note = 2'O-methyl-cytidine
  modified_base 23: mod_base = OTHER; note = 2'O-methyl-adenosine
  modified_base 1..2: mod_base = OTHER; note = phosphorothioate linkage
  modified_base 2..3: mod_base = OTHER; note = phosphorothioate linkage
  modified_base 21..22: mod_base = OTHER; note = phosphorothioate linkage
  modified_base 22..23: mod_base = OTHER; note = phosphorothioate linkage
  source 1..23: mol_type = other RNA
gacgctggatccggctcttgcca

SEQ ID NO: 460 - RNA, 23 nt, synthetic construct
  misc_feature 1..23: note = siRNA sequence name:ETXS428
  modified_base 1: mod_base = OTHER; note = 2'O-methyl-adenosine
  modified_base 2: mod_base = OTHER; note = 2' Fluoro-cytidine
  modified_base 3: mod_base = OTHER; note = 2'O-methyl-guanosine
  modified_base 4: mod_base = OTHER; note = 2'O-methyl-cytidine
  modified_base 5: mod_base = OTHER; note = 2'O-methyl-uridine
  modified_base 6: mod_base = OTHER; note = 2' Fluoro-guanosine
  modified_base 7: mod_base = OTHER; note = 2'O-methyl-guanosine
  modified_base 8: mod_base = OTHER; note = 2'Fluoro-adenosine
  modified_base 9: mod_base = OTHER; note = 2' Fluoro-uridine
  modified_base 10: mod_base = OTHER; note = 2'O-methyl-cytidine
  modified_base 11: mod_base = OTHER; note = 2'O-methyl-cytidine
  modified_base 12: mod_base = OTHER; note = 2'O-methyl-guanosine
  modified_base 13: mod_base = OTHER; note = 2'O-methyl-guanosine
  modified_base 14: mod_base = OTHER; note = 2' Fluoro-cytidine
  modified_base 15: mod_base = OTHER; note = 2'O-methyl-uridine
  modified_base 16: mod_base = OTHER; note = 2' Fluoro-cytidine
  modified_base 17: mod_base = OTHER; note = 2'O-methyl-uridine
  modified_base 18: mod_base = OTHER; note = 2'O-methyl-uridine
  modified_base 19: mod_base = OTHER; note = 2'O-methyl-guanosine
  modified_base 20: mod_base = OTHER; note = 2'O-methyl-cytidine
  modified_base 21: mod_base = OTHER; note = 2'O-methyl-cytidine
  modified_base 22: mod_base = OTHER; note = 2'O-methyl-adenosine
  modified_base 23: mod_base = OTHER; note = 2'O-methyl-uridine
  modified_base 1..2: mod_base = OTHER; note = phosphorothioate linkage
  modified_base 2..3: mod_base = OTHER; note = phosphorothioate linkage
  modified_base 21..22: mod_base = OTHER; note = phosphorothioate linkage
  modified_base 22..23: mod_base = OTHER; note = phosphorothioate linkage
  source 1..23: mol_type = other RNA
acgctggatccggctcttgccat

SEQ ID NO: 461 - RNA, 23 nt, synthetic construct
  misc_feature 1..23: note = siRNA sequence name:ETXS430
  modified_base 1: mod_base = OTHER; note = 2'O-methyl-uridine
  modified_base 2: mod_base = OTHER; note = 2' Fluoro-guanosine
  modified_base 3: mod_base = OTHER; note = 2'O-methyl-guanosine
  modified_base 4: mod_base = OTHER; note = 2'O-methyl-adenosine
  modified_base 5: mod_base = OTHER; note = 2'O-methyl-cytidine
  modified_base 6: mod_base = OTHER; note = 2'Fluoro-adenosine
  modified_base 7: mod_base = OTHER; note = 2'O-methyl-guanosine
  modified_base 8: mod_base = OTHER; note = 2' Fluoro-cytidine
  modified_base 9: mod_base = OTHER; note = 2' Fluoro-guanosine
  modified_base 10: mod_base = OTHER; note = 2'O-methyl-guanosine
  modified_base 11: mod_base = OTHER; note = 2'O-methyl-cytidine
  modified_base 12: mod_base = OTHER; note = 2'O-methyl-adenosine
  modified_base 13: mod_base = OTHER; note = 2'O-methyl-uridine
  modified_base 14: mod_base = OTHER; note = 2' Fluoro-guanosine
  modified_base 15: mod_base = OTHER; note = 2'O-methyl-adenosine
  modified_base 16: mod_base = OTHER; note = 2'Fluoro-adenosine
  modified_base 17: mod_base = OTHER; note = 2'O-methyl-cytidine
  modified_base 18: mod_base = OTHER; note = 2'O-methyl-cytidine
  modified_base 19: mod_base = OTHER; note = 2'O-methyl-cytidine
  modified_base 20: mod_base = OTHER; note = 2'O-methyl-cytidine
  modified_base 21: mod_base = OTHER; note = 2'O-methyl-adenosine
  modified_base 22: mod_base = OTHER; note = 2'O-methyl-cytidine
  modified_base 23: mod_base = OTHER; note = 2'O-methyl-cytidine
  modified_base 1..2: mod_base = OTHER; note = phosphorothioate linkage
  modified_base 2..3: mod_base = OTHER; note = phosphorothioate linkage
  modified_base 21..22: mod_base = OTHER; note = phosphorothioate linkage
  modified_base 22..23: mod_base = OTHER; note = phosphorothioate linkage
  source 1..23: mol_type = other RNA
tggacagcggcatgaaccccacc

SEQ ID NO: 462 - RNA, 19 nt, synthetic construct
  misc_feature 1..19: note = siRNA sequence name:ETXS432
  modified_base 1: mod_base = OTHER; note = 2'O-methyl-uridine
  modified_base 2: mod_base = OTHER; note = 2' Fluoro-uridine
  modified_base 3: mod_base = OTHER; note = 2'O-methyl-uridine
  modified_base 4: mod_base = OTHER; note = 2' Fluoro-cytidine
  modified_base 5: mod_base = OTHER; note = 2'O-methyl-cytidine
  modified_base 6: mod_base = OTHER; note = 2'Fluoro-adenosine
  modified_base 7: mod_base = OTHER; note = 2'O-methyl-cytidine
  modified_base 8: mod_base = OTHER; note = 2' Fluoro-uridine
  modified_base 9: mod_base = OTHER; note = 2'O-methyl-guanosine
  modified_base 10: mod_base = OTHER; note = 2' Fluoro-guanosine
  modified_base 11: mod_base = OTHER; note = 2'O-methyl-guanosine
  modified_base 12: mod_base = OTHER; note = 2'Fluoro-adenosine
  modified_base 13: mod_base = OTHER; note = 2'O-methyl-adenosine
  modified_base 14: mod_base = OTHER; note = 2' Fluoro-uridine
  modified_base 15: mod_base = OTHER; note = 2'O-methyl-uridine
  modified_base 16: mod_base = OTHER; note = 2' Fluoro-uridine
  modified_base 17: mod_base = OTHER; note = 2'O-methyl-adenosine
  modified_base 18: mod_base = OTHER; note = 2' Fluoro-uridine
  modified_base 19: mod_base = OTHER; note = 2'O-methyl-uridine
  modified_base 1..2: mod_base = OTHER; note = phosphorothioate linkage
  modified_base 2..3: mod_base = OTHER; note = phosphorothioate linkage
  modified_base 17..18: mod_base = OTHER; note = phosphorothioate linkage
  modified_base 18..19: mod_base = OTHER; note = phosphorothioate linkage
  source 1..19: mol_type = other RNA
tttccactgggaatttatt

SEQ ID NO: 463 - RNA, 19 nt, synthetic construct
  misc_feature 1..19: note = siRNA sequence name:ETXS434
  modified_base 1: mod_base = OTHER; note = 2'O-methyl-guanosine
  modified_base 2: mod_base = OTHER; note = 2'Fluoro-adenosine
  modified_base 3: mod_base = OTHER; note = 2'O-methyl-uridine
  modified_base 4: mod_base = OTHER; note = 2' Fluoro-cytidine
  modified_base 5: mod_base = OTHER; note = 2'O-methyl-cytidine
  modified_base 6: mod_base = OTHER; note = 2' Fluoro-uridine
  modified_base 7: mod_base = OTHER; note = 2'O-methyl-uridine
  modified_base 8: mod_base = OTHER; note = 2' Fluoro-uridine
  modified_base 9: mod_base = OTHER; note = 2'O-methyl-guanosine
  modified_base 10: mod_base = OTHER; note = 2'Fluoro-adenosine
  modified_base 11: mod_base = OTHER; note = 2'O-methyl-adenosine
  modified_base 12: mod_base = OTHER; note = 2' Fluoro-guanosine
  modified_base 13: mod_base = OTHER; note = 2'O-methyl-uridine
  modified_base 14: mod_base = OTHER; note = 2'Fluoro-adenosine
  modified_base 15: mod_base = OTHER; note = 2'O-methyl-guanosine
  modified_base 16: mod_base = OTHER; note = 2'Fluoro-adenosine
  modified_base 17: mod_base = OTHER; note = 2'O-methyl-uridine
  modified_base 18: mod_base = OTHER; note = 2' Fluoro-guanosine
  modified_base 19: mod_base = OTHER; note = 2'O-methyl-cytidine
  modified_base 1..2: mod_base = OTHER; note = phosphorothioate linkage
  modified_base 2..3: mod_base = OTHER; note = phosphorothioate linkage
  modified_base 17..18: mod_base = OTHER; note = phosphorothioate linkage
  modified_base 18..19: mod_base = OTHER; note = phosphorothioate linkage
  source 1..19: mol_type = other RNA
gatcctttgaagtagatgc

SEQ ID NO: 464 - RNA, 19 nt, synthetic construct
  misc_feature 1..19: note = siRNA sequence name:ETXS436
  modified_base 1: mod_base = OTHER; note = 2'O-methyl-adenosine
  modified_base 2: mod_base = OTHER; note = 2' Fluoro-uridine
  modified_base 3: mod_base = OTHER; note = 2'O-methyl-cytidine
  modified_base 4: mod_base = OTHER; note = 2' Fluoro-cytidine
  modified_base 5: mod_base = OTHER; note = 2'O-methyl-uridine
  modified_base 6: mod_base = OTHER; note = 2' Fluoro-uridine
  modified_base 7: mod_base = OTHER; note = 2'O-methyl-uridine
  modified_base 8: mod_base = OTHER; note = 2' Fluoro-guanosine
  modified_base 9: mod_base = OTHER; note = 2'O-methyl-adenosine
  modified_base 10: mod_base = OTHER; note = 2'Fluoro-adenosine
  modified_base 11: mod_base = OTHER; note = 2'O-methyl-guanosine
  modified_base 12: mod_base = OTHER; note = 2' Fluoro-uridine
  modified_base 13: mod_base = OTHER; note = 2'O-methyl-adenosine
  modified_base 14: mod_base = OTHER; note = 2' Fluoro-guanosine
  modified_base 15: mod_base = OTHER; note = 2'O-methyl-adenosine
  modified_base 16: mod_base = OTHER; note = 2' Fluoro-uridine
  modified_base 17: mod_base = OTHER; note = 2'O-methyl-guanosine
  modified_base 18: mod_base = OTHER; note = 2' Fluoro-cytidine
  modified_base 19: mod_base = OTHER; note = 2'O-methyl-adenosine
  modified_base 1..2: mod_base = OTHER; note = phosphorothioate linkage
  modified_base 2..3: mod_base = OTHER; note = phosphorothioate linkage
  modified_base 17..18: mod_base = OTHER; note = phosphorothioate linkage
  modified_base 18..19: mod_base = OTHER; note = phosphorothioate linkage
  source 1..19: mol_type = other RNA
atcctttgaagtagatgca

SEQ ID NO: 465 - RNA, 19 nt, synthetic construct
  misc_feature 1..19: note = siRNA sequence name:ETXS438
  modified_base 1: mod_base = OTHER; note = 2'O-methyl-adenosine
  modified_base 2: mod_base = OTHER; note = 2' Fluoro-cytidine
  modified_base 3: mod_base = OTHER; note = 2'O-methyl-uridine
  modified_base 4: mod_base = OTHER; note = 2' Fluoro-uridine
  modified_base 5: mod_base = OTHER; note = 2'O-methyl-guanosine
  modified_base 6: mod_base = OTHER; note = 2' Fluoro-uridine
  modified_base 7: mod_base = OTHER; note = 2'O-methyl-uridine
  modified_base 8: mod_base = OTHER; note = 2' Fluoro-cytidine
  modified_base 9: mod_base = OTHER; note = 2'O-methyl-adenosine
  modified_base 10: mod_base = OTHER; note = 2' Fluoro-uridine
  modified_base 11: mod_base = OTHER; note = 2'O-methyl-guanosine
  modified_base 12: mod_base = OTHER; note = 2' Fluoro-guanosine
  modified_base 13: mod_base = OTHER; note = 2'O-methyl-guanosine
  modified_base 14: mod_base = OTHER; note = 2' Fluoro-uridine
  modified_base 15: mod_base = OTHER; note = 2'O-methyl-cytidine
  modified_base 16: mod_base = OTHER; note = 2' Fluoro-uridine
  modified_base 17: mod_base = OTHER; note = 2'O-methyl-cytidine
  modified_base 18: mod_base = OTHER; note = 2' Fluoro-uridine
  modified_base 19: mod_base = OTHER; note = 2'O-methyl-cytidine
  modified_base 1..2: mod_base = OTHER; note = phosphorothioate linkage
  modified_base 2..3: mod_base = OTHER; note = phosphorothioate linkage
  modified_base 17..18: mod_base = OTHER; note = phosphorothioate linkage
  modified_base 18..19: mod_base = OTHER; note = phosphorothioate linkage
  source 1..19: mol_type = other RNA
acttgttcatgggtctctc

SEQ ID NO: 466 - RNA, 19 nt, synthetic construct
  misc_feature 1..19: note = siRNA sequence name:ETXS440
  modified_base 1: mod_base = OTHER; note = 2'O-methyl-uridine
  modified_base 2: mod_base = OTHER; note = 2' Fluoro-cytidine
  modified_base 3: mod_base = OTHER; note = 2'O-methyl-cytidine
  modified_base 4: mod_base = OTHER; note = 2'Fluoro-adenosine
  modified_base 5: mod_base = OTHER; note = 2'O-methyl-cytidine
  modified_base 6: mod_base = OTHER; note = 2' Fluoro-uridine
  modified_base 7: mod_base = OTHER; note = 2'O-methyl-guanosine
  modified_base 8: mod_base = OTHER; note = 2' Fluoro-guanosine
  modified_base 9: mod_base = OTHER; note = 2'O-methyl-guanosine
  modified_base 10: mod_base = OTHER; note = 2'Fluoro-adenosine
  modified_base 11: mod_base = OTHER; note = 2'O-methyl-adenosine
  modified_base 12: mod_base = OTHER; note = 2' Fluoro-uridine
  modified_base 13: mod_base = OTHER; note = 2'O-methyl-uridine
  modified_base 14: mod_base = OTHER; note = 2' Fluoro-uridine
  modified_base 15: mod_base = OTHER; note = 2'O-methyl-adenosine
  modified_base 16: mod_base = OTHER; note = 2' Fluoro-uridine
  modified_base 17: mod_base = OTHER; note = 2'O-methyl-uridine
  modified_base 18: mod_base = OTHER; note = 2' Fluoro-cytidine
  modified_base 19: mod_base = OTHER; note = 2'O-methyl-adenosine
  modified_base 1..2: mod_base = OTHER; note = phosphorothioate linkage
  modified_base 2..3: mod_base = OTHER; note = phosphorothioate linkage
  modified_base 17..18: mod_base = OTHER; note = phosphorothioate linkage
  modified_base 18..19: mod_base = OTHER; note = phosphorothioate linkage
  source 1..19: mol_type = other RNA
tccactgggaatttattca

SEQ ID NO: 467 - RNA, 19 nt, synthetic construct
  misc_feature 1..19: note = siRNA sequence name:ETXS442
  modified_base 1: mod_base = OTHER; note = 2'O-methyl-uridine
  modified_base 2: mod_base = OTHER; note = 2' Fluoro-guanosine
  modified_base 3: mod_base = OTHER; note = 2'O-methyl-uridine
  modified_base 4: mod_base = OTHER; note = 2'Fluoro-adenosine
  modified_base 5: mod_base = OTHER; note = 2'O-methyl-cytidine
  modified_base 6: mod_base = OTHER; note = 2' Fluoro-cytidine
  modified_base 7: mod_base = OTHER; note = 2'O-methyl-cytidine
  modified_base 8: mod_base = OTHER; note = 2'Fluoro-adenosine
  modified_base 9: mod_base = OTHER; note = 2'O-methyl-adenosine
  modified_base 10: mod_base = OTHER; note = 2'Fluoro-adenosine
  modified_base 11: mod_base = OTHER; note = 2'O-methyl-adenosine
  modified_base 12: mod_base = OTHER; note = 2' Fluoro-uridine
  modified_base 13: mod_base = OTHER; note = 2'O-methyl-uridine
  modified_base 14: mod_base = OTHER; note = 2' Fluoro-cytidine
  modified_base 15: mod_base = OTHER; note = 2'O-methyl-cytidine
  modified_base 16: mod_base = OTHER; note = 2' Fluoro-uridine
  modified_base 17: mod_base = OTHER; note = 2'O-methyl-cytidine
  modified_base 18: mod_base = OTHER; note = 2' Fluoro-cytidine
  modified_base 19: mod_base = OTHER; note = 2'O-methyl-uridine
  modified_base 1..2: mod_base = OTHER; note = phosphorothioate linkage
  modified_base 2..3: mod_base = OTHER; note = phosphorothioate linkage
  modified_base 17..18: mod_base = OTHER; note = phosphorothioate linkage
  modified_base 18..19: mod_base = OTHER; note = phosphorothioate linkage
  source 1..19: mol_type = other RNA
tgtacccaaaattcctcct

SEQ ID NO: 468 - RNA, 19 nt, synthetic construct
  misc_feature 1..19: note = siRNA sequence name:ETXS444
  modified_base 1: mod_base = OTHER; note = 2'O-methyl-uridine
  modified_base 2: mod_base = OTHER; note = 2' Fluoro-uridine
  modified_base 3: mod_base = OTHER; note = 2'O-methyl-cytidine
  modified_base 4: mod_base = OTHER; note = 2' Fluoro-cytidine
  modified_base 5: mod_base = OTHER; note = 2'O-methyl-cytidine
  modified_base 6: mod_base = OTHER; note = 2'Fluoro-adenosine
  modified_base 7: mod_base = OTHER; note = 2'O-methyl-uridine
  modified_base 8: mod_base = OTHER; note = 2' Fluoro-guanosine
  modified_base 9: mod_base = OTHER; note = 2'O-methyl-adenosine
  modified_base 10: mod_base = OTHER; note = 2'Fluoro-adenosine
  modified_base 11: mod_base = OTHER; note = 2'O-methyl-guanosine
  modified_base 12: mod_base = OTHER; note = 2'Fluoro-adenosine
  modified_base 13: mod_base = OTHER; note = 2'O-methyl-guanosine
  modified_base 14: mod_base = OTHER; note = 2' Fluoro-cytidine
  modified_base 15: mod_base = OTHER; note = 2'O-methyl-adenosine
  modified_base 16: mod_base = OTHER; note = 2' Fluoro-guanosine
  modified_base 17: mod_base = OTHER; note = 2'O-methyl-guanosine
  modified_base 18: mod_base = OTHER; note = 2' Fluoro-cytidine
  modified_base 19: mod_base = OTHER; note = 2'O-methyl-adenosine
  modified_base 1..2: mod_base = OTHER; note = phosphorothioate linkage
  modified_base 2..3: mod_base = OTHER; note = phosphorothioate linkage
  modified_base 17..18: mod_base = OTHER; note = phosphorothioate linkage
  modified_base 18..19: mod_base = OTHER; note = phosphorothioate linkage
  source 1..19: mol_type = other RNA
ttcccatgaagagcaggca

SEQ ID NO: 469 - RNA, 19 nt, synthetic construct
  misc_feature 1..19: note = siRNA sequence name:ETXS446
  modified_base 1: mod_base = OTHER; note = 2'O-methyl-uridine
  modified_base 2: mod_base = OTHER; note = 2' Fluoro-cytidine
  modified_base 3: mod_base = OTHER; note = 2'O-methyl-uridine
  modified_base 4: mod_base = OTHER; note = 2' Fluoro-uridine
  modified_base 5: mod_base = OTHER; note = 2'O-methyl-uridine
  modified_base 6: mod_base = OTHER; note = 2' Fluoro-uridine
  modified_base 7: mod_base = OTHER; note = 2'O-methyl-adenosine
  modified_base 8: mod_base = OTHER; note = 2' Fluoro-uridine
  modified_base 9: mod_base = OTHER; note = 2'O-methyl-guanosine
  modified_base 10: mod_base = OTHER; note = 2'Fluoro-adenosine
  modified_base 11: mod_base = OTHER; note = 2'O-methyl-guanosine
  modified_base 12: mod_base = OTHER; note = 2' Fluoro-guanosine
  modified_base 13: mod_base = OTHER; note = 2'O-methyl-cytidine
  modified_base 14: mod_base = OTHER; note = 2' Fluoro-cytidine
  modified_base 15: mod_base = OTHER; note = 2'O-methyl-cytidine
  modified_base 16: mod_base = OTHER; note = 2' Fluoro-uridine
  modified_base 17: mod_base = OTHER; note = 2'O-methyl-uridine
  modified_base 18: mod_base = OTHER; note = 2' Fluoro-guanosine
  modified_base 19: mod_base = OTHER; note = 2'O-methyl-guanosine
  modified_base 1..2: mod_base = OTHER; note = phosphorothioate linkage
  modified_base 2..3: mod_base = OTHER; note = phosphorothioate linkage
  modified_base 17..18: mod_base = OTHER; note = phosphorothioate linkage
  modified_base 18..19: mod_base = OTHER; note = phosphorothioate linkage
  source 1..19: mol_type = other RNA
tcttttatgaggcccttgg

SEQ ID NO: 470 - RNA, 19 nt, synthetic construct
  misc_feature 1..19: note = siRNA sequence name:ETXS448
  modified_base 1: mod_base = OTHER; note = 2'O-methyl-adenosine
  modified_base 2: mod_base = OTHER; note = 2'Fluoro-adenosine
  modified_base 3: mod_base = OTHER; note = 2'O-methyl-cytidine
  modified_base 4: mod_base = OTHER; note = 2' Fluoro-uridine
  modified_base 5: mod_base = OTHER; note = 2'O-methyl-guanosine
  modified_base 6: mod_base = OTHER; note = 2' Fluoro-cytidine
  modified_base 7: mod_base = OTHER; note = 2'O-methyl-uridine
  modified_base 8: mod_base = OTHER; note = 2' Fluoro-uridine
  modified_base 9: mod_base = OTHER; note = 2'O-methyl-cytidine
  modified_base 10: mod_base = OTHER; note = 2' Fluoro-uridine
  modified_base 11: mod_base = OTHER; note = 2'O-methyl-guanosine
  modified_base 12: mod_base = OTHER; note = 2' Fluoro-guanosine
  modified_base 13: mod_base = OTHER; note = 2'O-methyl-adenosine
  modified_base 14: mod_base = OTHER; note = 2' Fluoro-uridine
  modified_base 15: mod_base = OTHER; note = 2'O-methyl-adenosine
  modified_base 16: mod_base = OTHER; note = 2' Fluoro-uridine
  modified_base 17: mod_base = OTHER; note = 2'O-methyl-adenosine
  modified_base 18: mod_base = OTHER; note = 2'Fluoro-adenosine
  modified_base 19: mod_base = OTHER; note = 2'O-methyl-adenosine
  modified_base 1..2: mod_base = OTHER; note = phosphorothioate linkage
  modified_base 2..3: mod_base = OTHER; note = phosphorothioate linkage
  modified_base 17..18: mod_base = OTHER; note = phosphorothioate linkage
  modified_base 18..19: mod_base = OTHER; note = phosphorothioate linkage
  source 1..19: mol_type = other RNA
aactgcttctggatataaa

SEQ ID NO: 471 - RNA, 19 nt, synthetic construct
  misc_feature 1..19: note = siRNA sequence name:ETXS450
  modified_base 1: mod_base = OTHER; note = 2'O-methyl-cytidine
  modified_base 2: mod_base = OTHER; note = 2' Fluoro-cytidine
  modified_base 3: mod_base = OTHER; note = 2'O-methyl-uridine
  modified_base 4: mod_base = OTHER; note = 2' Fluoro-uridine
  modified_base 5: mod_base = OTHER; note = 2'O-methyl-uridine
  modified_base 6: mod_base = OTHER; note = 2' Fluoro-guanosine
  modified_base 7: mod_base = OTHER; note = 2'O-methyl-adenosine
  modified_base 8: mod_base = OTHER; note = 2'Fluoro-adenosine
  modified_base 9: mod_base = OTHER; note = 2'O-methyl-guanosine
  modified_base 10: mod_base = OTHER; note = 2' Fluoro-uridine
  modified_base 11: mod_base = OTHER; note = 2'O-methyl-adenosine
  modified_base 12: mod_base = OTHER; note = 2' Fluoro-guanosine
  modified_base 13: mod_base = OTHER; note = 2'O-methyl-adenosine
  modified_base 14: mod_base = OTHER; note = 2' Fluoro-uridine
  modified_base 15: mod_base = OTHER; note = 2'O-methyl-guanosine
  modified_base 16: mod_base = OTHER; note = 2' Fluoro-cytidine
  modified_base 17: mod_base = OTHER; note = 2'O-methyl-adenosine
  modified_base 18: mod_base = OTHER; note = 2' Fluoro-guanosine
  modified_base 19: mod_base = OTHER; note = 2'O-methyl-uridine
  modified_base 1..2: mod_base = OTHER; note = phosphorothioate linkage
  modified_base 2..3: mod_base = OTHER; note = phosphorothioate linkage
  modified_base 17..18: mod_base = OTHER; note = phosphorothioate linkage
  modified_base 18..19: mod_base = OTHER; note = phosphorothioate linkage
  source 1..19: mol_type = other RNA
cctttgaagtagatgcagt

SEQ ID NO: 472 - RNA, 19 nt, synthetic construct
  misc_feature 1..19: note = siRNA sequence name:ETXS452
  modified_base 1: mod_base = OTHER; note = 2'O-methyl-uridine
  modified_base 2: mod_base = OTHER; note = 2' Fluoro-uridine
  modified_base 3: mod_base = OTHER; note = 2'O-methyl-adenosine
  modified_base 4: mod_base = OTHER; note = 2'Fluoro-adenosine
  modified_base 5: mod_base = OTHER; note = 2'O-methyl-guanosine
  modified_base 6: mod_base = OTHER; note = 2'Fluoro-adenosine
  modified_base 7: mod_base = OTHER; note = 2'O-methyl-cytidine
  modified_base 8: mod_base = OTHER; note = 2' Fluoro-guanosine
  modified_base 9: mod_base = OTHER; note = 2'O-methyl-cytidine
  modified_base 10: mod_base = OTHER; note = 2' Fluoro-uridine
  modified_base 11: mod_base = OTHER; note = 2'O-methyl-guanosine
  modified_base 12: mod_base = OTHER; note = 2' Fluoro-guanosine
  modified_base 13: mod_base = OTHER; note = 2'O-methyl-adenosine
  modified_base 14: mod_base = OTHER; note = 2' Fluoro-uridine
  modified_base 15: mod_base = OTHER; note = 2'O-methyl-cytidine
  modified_base 16: mod_base = OTHER; note = 2' Fluoro-cytidine
  modified_base 17: mod_base = OTHER; note = 2'O-methyl-guanosine
  modified_base 18: mod_base = OTHER; note = 2' Fluoro-guanosine
  modified_base 19: mod_base = OTHER; note = 2'O-methyl-cytidine
  modified_base 1..2: mod_base = OTHER; note = phosphorothioate linkage
  modified_base 2..3: mod_base = OTHER; note = phosphorothioate linkage
  modified_base 17..18: mod_base = OTHER; note = phosphorothioate linkage
  modified_base 18..19: mod_base = OTHER; note = phosphorothioate linkage
  source 1..19: mol_type = other RNA
ttaagacgctggatccggc

SEQ ID NO: 473 - RNA, 19 nt, synthetic construct
  misc_feature 1..19: note = siRNA sequence name:ETXS454
  modified_base 1: mod_base = OTHER; note = 2'O-methyl-guanosine
  modified_base 2: mod_base = OTHER; note = 2'Fluoro-adenosine
  modified_base 3: mod_base = OTHER; note = 2'O-methyl-guanosine
  modified_base 4: mod_base = OTHER; note = 2' Fluoro-guanosine
  modified_base 5: mod_base = OTHER; note = 2'O-methyl-adenosine
  modified_base 6: mod_base = OTHER; note = 2' Fluoro-uridine
  modified_base 7: mod_base = OTHER; note = 2'O-methyl-guanosine
  modified_base 8: mod_base = OTHER; note = 2' Fluoro-uridine
  modified_base 9: mod_base = OTHER; note = 2'O-methyl-uridine
  modified_base 10: mod_base = OTHER; note = 2'Fluoro-adenosine
  modified_base 11: mod_base = OTHER; note = 2'O-methyl-adenosine
  modified_base 12: mod_base = OTHER; note = 2' Fluoro-guanosine
  modified_base 13: mod_base = OTHER; note = 2'O-methyl-adenosine
  modified_base 14: mod_base = OTHER; note = 2' Fluoro-cytidine
  modified_base 15: mod_base = OTHER; note = 2'O-methyl-guanosine
  modified_base 16: mod_base = OTHER; note = 2' Fluoro-cytidine
  modified_base 17: mod_base = OTHER; note = 2'O-methyl-uridine
  modified_base 18: mod_base = OTHER; note = 2' Fluoro-guanosine
  modified_base 19: mod_base = OTHER; note = 2'O-methyl-guanosine
  modified_base 1..2: mod_base = OTHER; note = phosphorothioate linkage
  modified_base 2..3: mod_base = OTHER; note = phosphorothioate linkage
  modified_base 17..18: mod_base = OTHER; note = phosphorothioate linkage
  modified_base 18..19: mod_base = OTHER; note = phosphorothioate linkage
  source 1..19: mol_type = other RNA
gaggatgttaagacgctgg

SEQ ID NO: 474 - RNA, 19 nt, synthetic construct
  misc_feature 1..19: note = siRNA sequence name:ETXS456
  modified_base 1: mod_base = OTHER; note = 2'O-methyl-uridine
  modified_base 2: mod_base = OTHER; note = 2' Fluoro-cytidine
  modified_base 3: mod_base = OTHER; note = 2'O-methyl-uridine
  modified_base 4: mod_base = OTHER; note = 2' Fluoro-guanosine
  modified_base 5: mod_base = OTHER; note = 2'O-methyl-uridine
  modified_base 6: mod_base = OTHER; note = 2' Fluoro-uridine
  modified_base 7: mod_base = OTHER; note = 2'O-methyl-uridine
  modified_base 8: mod_base = OTHER; note = 2' Fluoro-guanosine
  modified_base 9: mod_base = OTHER; note = 2'O-methyl-uridine
  modified_base 10: mod_base = OTHER; note = 2' Fluoro-cytidine
  modified_base 11: mod_base = OTHER; note = 2'O-methyl-adenosine
  modified_base 12: mod_base = OTHER; note = 2' Fluoro-uridine
  modified_base 13: mod_base = OTHER; note = 2'O-methyl-guanosine
  modified_base 14: mod_base = OTHER; note = 2' Fluoro-cytidine
  modified_base 15: mod_base = OTHER; note = 2'O-methyl-uridine
  modified_base 16: mod_base = OTHER; note = 2' Fluoro-uridine
  modified_base 17: mod_base = OTHER; note = 2'O-methyl-uridine
  modified_base 18: mod_base = OTHER; note = 2' Fluoro-uridine
  modified_base 19: mod_base = OTHER; note = 2'O-methyl-uridine
  modified_base 1..2: mod_base = OTHER; note = phosphorothioate linkage
  modified_base 2..3: mod_base = OTHER; note = phosphorothioate linkage
  modified_base 17..18: mod_base = OTHER; note = phosphorothioate linkage
  modified_base 18..19: mod_base = OTHER; note = phosphorothioate linkage
  source 1..19: mol_type = other RNA
tctgtttgtcatgcttttt

SEQ ID NO: 475 - RNA, 19 nt, synthetic construct
  misc_feature 1..19: note = siRNA sequence name:ETXS458
  modified_base 1: mod_base = OTHER; note = 2'O-methyl-guanosine
  modified_base 2: mod_base = OTHER; note = 2' Fluoro-uridine
  modified_base 3: mod_base = OTHER; note = 2'O-methyl-guanosine
  modified_base 4: mod_base = OTHER; note = 2' Fluoro-uridine
  modified_base 5: mod_base = OTHER; note = 2'O-methyl-adenosine
  modified_base 6: mod_base = OTHER; note = 2' Fluoro-cytidine
  modified_base 7: mod_base = OTHER; note = 2'O-methyl-cytidine
  modified_base 8: mod_base = OTHER; note = 2' Fluoro-cytidine
  modified_base 9: mod_base = OTHER; note = 2'O-methyl-adenosine
  modified_base 10: mod_base = OTHER; note = 2'Fluoro-adenosine
  modified_base 11: mod_base = OTHER; note = 2'O-methyl-adenosine
  modified_base 12: mod_base = OTHER; note = 2'Fluoro-adenosine
  modified_base 13: mod_base = OTHER; note = 2'O-methyl-uridine
  modified_base 14: mod_base = OTHER; note = 2' Fluoro-uridine
  modified_base 15: mod_base = OTHER; note = 2'O-methyl-cytidine
  modified_base 16: mod_base = OTHER; note = 2' Fluoro-cytidine
  modified_base 17: mod_base = OTHER; note = 2'O-methyl-uridine
  modified_base 18: mod_base = OTHER; note = 2' Fluoro-cytidine
  modified_base 19: mod_base = OTHER; note = 2'O-methyl-cytidine
  modified_base 1..2: mod_base = OTHER; note = phosphorothioate linkage
  modified_base 2..3: mod_base = OTHER; note = phosphorothioate linkage
  modified_base 17..18: mod_base = OTHER; note = phosphorothioate linkage
  modified_base 18..19: mod_base = OTHER; note = phosphorothioate linkage
  source 1..19: mol_type = other RNA
gtgtacccaaaattcctcc

SEQ ID NO: 476 - RNA, 19 nt, synthetic construct
  misc_feature 1..19: note = siRNA sequence name:ETXS460
  modified_base 1: mod_base = OTHER; note = 2'O-methyl-uridine
  modified_base 2: mod_base = OTHER; note = 2' Fluoro-uridine
  modified_base 3: mod_base = OTHER; note = 2'O-methyl-cytidine
  modified_base 4: mod_base = OTHER; note = 2'Fluoro-adenosine
  modified_base 5: mod_base = OTHER; note = 2'O-methyl-guanosine
  modified_base 6: mod_base = OTHER; note = 2' Fluoro-cytidine
  modified_base 7: mod_base = OTHER; note = 2'O-methyl-cytidine
  modified_base 8: mod_base = OTHER; note = 2' Fluoro-guanosine
  modified_base 9: mod_base = OTHER; note = 2'O-methyl-guanosine
  modified_base 10: mod_base = OTHER; note = 2'Fluoro-adenosine
  modified_base 11: mod_base = OTHER; note = 2'O-methyl-adenosine
  modified_base 12: mod_base = OTHER; note = 2' Fluoro-guanosine
  modified_base 13: mod_base = OTHER; note = 2'O-methyl-uridine
  modified_base 14: mod_base = OTHER; note = 2' Fluoro-uridine
  modified_base 15: mod_base = OTHER; note = 2'O-methyl-guanosine
  modified_base 16: mod_base = OTHER; note = 2' Fluoro-uridine
  modified_base 17: mod_base = OTHER; note = 2'O-methyl-guanosine
  modified_base 18: mod_base = OTHER; note = 2' Fluoro-guanosine
  modified_base 19: mod_base = OTHER; note = 2'O-methyl-uridine
  modified_base 1..2: mod_base = OTHER; note = phosphorothioate linkage
  modified_base 2..3: mod_base = OTHER; note = phosphorothioate linkage
  modified_base 17..18: mod_base = OTHER; note = phosphorothioate linkage
  modified_base 18..19: mod_base = OTHER; note = phosphorothioate linkage
  source 1..19: mol_type = other RNA
ttcagccggaagttgtggt

SEQ ID NO: 477 - RNA, 19 nt, synthetic construct
  misc_feature 1..19: note = siRNA sequence name:ETXS462
  modified_base 1: mod_base = OTHER; note = 2'O-methyl-uridine
  modified_base 2: mod_base = OTHER; note = 2' Fluoro-guanosine
  modified_base 3: mod_base = OTHER; note = 2'O-methyl-uridine
  modified_base 4: mod_base = OTHER; note = 2' Fluoro-uridine
  modified_base 5: mod_base = OTHER; note = 2'O-methyl-uridine
  modified_base 6: mod_base = OTHER; note = 2' Fluoro-guanosine
  modified_base 7: mod_base = OTHER; note = 2'O-methyl-uridine
  modified_base 8: mod_base = OTHER; note = 2' Fluoro-cytidine
  modified_base 9: mod_base = OTHER; note = 2'O-methyl-adenosine
  modified_base 10: mod_base = OTHER; note = 2' Fluoro-uridine
  modified_base 11: mod_base = OTHER; note = 2'O-methyl-guanosine
  modified_base 12: mod_base = OTHER; note = 2' Fluoro-cytidine
  modified_base 13: mod_base = OTHER; note = 2'O-methyl-uridine
  modified_base 14: mod_base = OTHER; note = 2' Fluoro-uridine
  modified_base 15: mod_base = OTHER; note = 2'O-methyl-uridine
  modified_base 16: mod_base = OTHER; note = 2' Fluoro-uridine
  modified_base 17: mod_base = OTHER; note = 2'O-methyl-uridine
  modified_base 18: mod_base = OTHER; note = 2' Fluoro-uridine
  modified_base 19: mod_base = OTHER; note = 2'O-methyl-guanosine
  modified_base 1..2: mod_base = OTHER; note = phosphorothioate linkage
  modified_base 2..3: mod_base = OTHER; note = phosphorothioate linkage
  modified_base 17..18: mod_base = OTHER; note = phosphorothioate linkage
  modified_base 18..19: mod_base = OTHER; note = phosphorothioate linkage
  source 1..19: mol_type = other RNA
tgtttgtcatgcttttttg

SEQ ID NO: 478 - RNA, 19 nt, synthetic construct
  misc_feature 1..19: note = siRNA sequence name:ETXS464
  modified_base 1: mod_base = OTHER; note = 2'O-methyl-adenosine
  modified_base 2: mod_base = OTHER; note = 2' Fluoro-uridine
  modified_base 3: mod_base = OTHER; note = 2'O-methyl-uridine
  modified_base 4: mod_base = OTHER; note = 2' Fluoro-uridine
  modified_base 5: mod_base = OTHER; note = 2'O-methyl-cytidine
  modified_base 6: mod_base = OTHER; note = 2' Fluoro-cytidine
  modified_base 7: mod_base = OTHER; note = 2'O-methyl-adenosine
  modified_base 8: mod_base = OTHER; note = 2' Fluoro-cytidine
  modified_base 9: mod_base = OTHER; note = 2'O-methyl-uridine
  modified_base 10: mod_base = OTHER; note = 2' Fluoro-guanosine
  modified_base 11: mod_base = OTHER; note = 2'O-methyl-guanosine
  modified_base 12: mod_base = OTHER; note = 2' Fluoro-guanosine
  modified_base 13: mod_base = OTHER; note = 2'O-methyl-adenosine
  modified_base 14: mod_base = OTHER; note = 2'Fluoro-adenosine
  modified_base 15: mod_base = OTHER; note = 2'O-methyl-uridine
  modified_base 16: mod_base = OTHER; note = 2' Fluoro-uridine
  modified_base 17: mod_base = OTHER; note = 2'O-methyl-uridine
  modified_base 18: mod_base = OTHER; note = 2'Fluoro-adenosine
  modified_base 19: mod_base = OTHER; note = 2'O-methyl-uridine
  modified_base 1..2: mod_base = OTHER; note = phosphorothioate linkage
  modified_base 2..3: mod_base = OTHER; note = phosphorothioate linkage
  modified_base 17..18: mod_base = OTHER; note = phosphorothioate linkage
  modified_base 18..19: mod_base = OTHER; note = phosphorothioate linkage
  source 1..19: mol_type = other RNA
atttccactgggaatttat

SEQ ID NO: 479 - RNA, 19 nt, synthetic construct
  misc_feature 1..19: note = siRNA sequence name:ETXS466
  modified_base 1: mod_base = OTHER; note = 2'O-methyl-adenosine
  modified_base 2: mod_base = OTHER; note = 2' Fluoro-cytidine
  modified_base 3: mod_base = OTHER; note = 2'O-methyl-adenosine
  modified_base 4: mod_base = OTHER; note = 2'Fluoro-adenosine
  modified_base 5: mod_base = OTHER; note = 2'O-methyl-uridine
  modified_base 6: mod_base = OTHER; note = 2' Fluoro-uridine
  modified_base 7: mod_base = OTHER; note = 2'O-methyl-adenosine
  modified_base 8: mod_base = OTHER; note = 2' Fluoro-guanosine
  modified_base 9: mod_base = OTHER; note = 2'O-methyl-cytidine
  modified_base 10: mod_base = OTHER; note = 2'Fluoro-adenosine
  modified_base 11: mod_base = OTHER; note = 2'O-methyl-uridine
  modified_base 12: mod_base = OTHER; note = 2' Fluoro-guanosine
  modified_base 13: mod_base = OTHER; note = 2'O-methyl-cytidine
  modified_base 14: mod_base = OTHER; note = 2' Fluoro-uridine
  modified_base 15: mod_base = OTHER; note = 2'O-methyl-guanosine
  modified_base 16: mod_base = OTHER; note = 2'Fluoro-adenosine
  modified_base 17: mod_base = OTHER; note = 2'O-methyl-uridine
  modified_base 18: mod_base = OTHER; note = 2' Fluoro-guanosine
  modified_base 19: mod_base = OTHER; note = 2'O-methyl-cytidine
  modified_base 1..2: mod_base = OTHER; note = phosphorothioate linkage
  modified_base 2..3: mod_base = OTHER; note = phosphorothioate linkage
  modified_base 17..18: mod_base = OTHER; note = phosphorothioate linkage
  modified_base 18..19: mod_base = OTHER; note = phosphorothioate linkage
  source 1..19: mol_type = other RNA
acaattagcatgctgatgc

SEQ ID NO: 480 - RNA, 19 nt, synthetic construct
  misc_feature 1..19: note = siRNA sequence name:ETXS468
  modified_base 1: mod_base = OTHER; note = 2'O-methyl-guanosine
  modified_base 2: mod_base = OTHER; note = 2' Fluoro-uridine
  modified_base 3: mod_base = OTHER; note = 2'O-methyl-uridine
  modified_base 4: mod_base = OTHER; note = 2' Fluoro-cytidine
  modified_base 5: mod_base = OTHER; note = 2'O-methyl-uridine
  modified_base 6: mod_base = OTHER; note = 2' Fluoro-guanosine
  modified_base 7: mod_base = OTHER; note = 2'O-methyl-uridine
  modified_base 8: mod_base = OTHER; note = 2' Fluoro-uridine
  modified_base 9: mod_base = OTHER; note = 2'O-methyl-uridine
  modified_base 10: mod_base = OTHER; note = 2' Fluoro-guanosine
  modified_base 11: mod_base = OTHER; note = 2'O-methyl-uridine
  modified_base 12: mod_base = OTHER; note = 2' Fluoro-cytidine
  modified_base 13: mod_base = OTHER; note = 2'O-methyl-adenosine
  modified_base 14: mod_base = OTHER; note = 2' Fluoro-uridine
  modified_base 15: mod_base = OTHER; note = 2'O-methyl-guanosine
  modified_base 16: mod_base = OTHER; note = 2' Fluoro-cytidine
  modified_base 17: mod_base = OTHER; note = 2'O-methyl-uridine
  modified_base 18: mod_base = OTHER; note = 2' Fluoro-uridine
  modified_base 19: mod_base = OTHER; note = 2'O-methyl-uridine
  modified_base 1..2: mod_base = OTHER; note = phosphorothioate linkage
  modified_base 2..3: mod_base = OTHER; note = phosphorothioate linkage
  modified_base 17..18: mod_base = OTHER; note = phosphorothioate linkage
  modified_base 18..19: mod_base = OTHER; note = phosphorothioate linkage
  source 1..19: mol_type = other RNA
gttctgtttgtcatgcttt

SEQ ID NO: 481 - RNA, 19 nt, synthetic construct
  misc_feature 1..19: note = siRNA sequence name:ETXS470
  modified_base 1: mod_base = OTHER; note = 2'O-methyl-guanosine
  modified_base 2: mod_base = OTHER; note = 2' Fluoro-guanosine
  modified_base 3: mod_base = OTHER; note = 2'O-methyl-cytidine
  modified_base 4: mod_base = OTHER; note = 2' Fluoro-cytidine
  modified_base 5: mod_base = OTHER; note = 2'O-methyl-uridine
  modified_base 6: mod_base = OTHER; note = 2' Fluoro-cytidine
  modified_base 7: mod_base = OTHER; note = 2'O-methyl-adenosine
  modified_base 8: mod_base = OTHER; note = 2' Fluoro-guanosine
  modified_base 9: mod_base = OTHER; note = 2'O-methyl-cytidine
  modified_base 10: mod_base = OTHER; note = 2'Fluoro-adenosine
  modified_base 11: mod_base = OTHER; note = 2'O-methyl-adenosine
  modified_base 12: mod_base = OTHER; note = 2'Fluoro-adenosine
  modified_base 13: mod_base = OTHER; note = 2'O-methyl-guanosine
  modified_base 14: mod_base = OTHER; note = 2' Fluoro-uridine
  modified_base 15: mod_base = OTHER; note = 2'O-methyl-adenosine
  modified_base 16: mod_base = OTHER; note = 2'Fluoro-adenosine
  modified_base 17: mod_base = OTHER; note = 2'O-methyl-uridine
  modified_base 18: mod_base = OTHER; note = 2'Fluoro-adenosine
  modified_base 19: mod_base = OTHER; note = 2'O-methyl-cytidine
  modified_base 1..2: mod_base = OTHER; note = phosphorothioate linkage
  modified_base 2..3: mod_base = OTHER; note = phosphorothioate linkage
  modified_base 17..18: mod_base = OTHER; note = phosphorothioate linkage
  modified_base 18..19: mod_base = OTHER; note = phosphorothioate linkage
  source 1..19: mol_type = other RNA
ggcctcagcaaagtaatac

SEQ ID NO: 482 - RNA, 23 nt, synthetic construct
  misc_feature 1..23: note = siRNA sequence name:ETXS472
  modified_base 1: mod_base = OTHER; note = 2'O-methyl-uridine
  modified_base 2: mod_base = OTHER; note = 2' Fluoro-uridine
  modified_base 3: mod_base = OTHER; note = 2'O-methyl-uridine
  modified_base 4: mod_base = OTHER; note = 2' Fluoro-cytidine
  modified_base 5: mod_base = OTHER; note = 2'O-methyl-cytidine
  modified_base 6: mod_base = OTHER; note = 2'Fluoro-adenosine
  modified_base 7: mod_base = OTHER; note = 2'O-methyl-cytidine
  modified_base 8: mod_base = OTHER; note = 2' Fluoro-uridine
  modified_base 9: mod_base = OTHER; note = 2' Fluoro-guanosine
  modified_base 10: mod_base = OTHER; note = 2'O-methyl-guanosine
  modified_base 11: mod_base = OTHER; note = 2'O-methyl-guanosine
  modified_base 12: mod_base = OTHER; note = 2'O-methyl-adenosine
  modified_base 13: mod_base = OTHER; note = 2'O-methyl-adenosine
  modified_base 14: mod_base = OTHER; note = 2' Fluoro-uridine
  modified_base 15: mod_base = OTHER; note = 2'O-methyl-uridine
  modified_base 16: mod_base = OTHER; note = 2' Fluoro-uridine
  modified_base 17: mod_base = OTHER; note = 2'O-methyl-adenosine
  modified_base 18: mod_base = OTHER; note = 2'O-methyl-uridine
  modified_base 19: mod_base = OTHER; note = 2'O-methyl-uridine
  modified_base 20: mod_base = OTHER; note = 2'O-methyl-cytidine
  modified_base 21: mod_base = OTHER; note = 2'O-methyl-adenosine
  modified_base 22: mod_base = OTHER; note = 2'O-methyl-cytidine
  modified_base 23: mod_base = OTHER; note = 2'O-methyl-cytidine
  modified_base 1..2: mod_base = OTHER; note = phosphorothioate linkage
  modified_base 2..3: mod_base = OTHER; note = phosphorothioate linkage
  modified_base 21..22: mod_base = OTHER; note = phosphorothioate linkage
  modified_base 22..23: mod_base = OTHER; note = phosphorothioate linkage
  source 1..23: mol_type = other RNA
tttccactgggaatttattcacc

SEQ ID NO: 483 - RNA, 23 nt, synthetic construct
  misc_feature 1..23: note = siRNA sequence name:ETXS474
  modified_base 1: mod_base = OTHER; note = 2'O-methyl-guanosine
  modified_base 2: mod_base = OTHER; note = 2'Fluoro-adenosine
  modified_base 3: mod_base = OTHER; note = 2'O-methyl-uridine
  modified_base 4: mod_base = OTHER; note = 2' Fluoro-cytidine
  modified_base 5: mod_base = OTHER; note = 2'O-methyl-cytidine
  modified_base 6: mod_base = OTHER; note = 2' Fluoro-uridine
  modified_base 7: mod_base = OTHER; note = 2'O-methyl-uridine
  modified_base 8: mod_base = OTHER; note = 2' Fluoro-uridine
  modified_base 9: mod_base = OTHER; note = 2' Fluoro-guanosine
  modified_base 10: mod_base = OTHER; note = 2'O-methyl-adenosine
  modified_base 11: mod_base = OTHER; note = 2'O-methyl-adenosine
  modified_base 12: mod_base = OTHER; note = 2'O-methyl-guanosine
  modified_base 13: mod_base = OTHER; note = 2'O-methyl-uridine
  modified_base 14: mod_base = OTHER; note = 2'Fluoro-adenosine
  modified_base 15: mod_base = OTHER; note = 2'O-methyl-guanosine
  modified_base 16: mod_base = OTHER; note = 2'Fluoro-adenosine
  modified_base 17: mod_base = OTHER; note = 2'O-methyl-uridine
  modified_base 18: mod_base = OTHER; note = 2'O-methyl-guanosine
  modified_base 19: mod_base = OTHER; note = 2'O-methyl-cytidine
  modified_base 20: mod_base = OTHER; note = 2'O-methyl-adenosine
  modified_base 21: mod_base = OTHER; note = 2'O-methyl-guanosine
  modified_base 22: mod_base = OTHER; note = 2'O-methyl-uridine
  modified_base 23: mod_base = OTHER; note = 2'O-methyl-uridine
  modified_base 1..2: mod_base = OTHER; note = phosphorothioate linkage
  modified_base 2..3: mod_base = OTHER; note = phosphorothioate linkage
  modified_base 21..22: mod_base = OTHER; note = phosphorothioate linkage
  modified_base 22..23: mod_base = OTHER; note = phosphorothioate linkage
  source 1..23: mol_type = other RNA
gatcctttgaagtagatgcagtt

SEQ ID NO: 484 - RNA, 23 nt, synthetic construct
  misc_feature 1..23: note = siRNA sequence name:ETXS476
  modified_base 1: mod_base = OTHER; note = 2'O-methyl-adenosine
  modified_base 2: mod_base = OTHER; note = 2' Fluoro-uridine
  modified_base 3: mod_base = OTHER; note = 2'O-methyl-cytidine
  modified_base 4: mod_base = OTHER; note = 2' Fluoro-cytidine
  modified_base 5: mod_base = OTHER; note = 2'O-methyl-uridine
  modified_base 6: mod_base = OTHER; note = 2' Fluoro-uridine
  modified_base 7: mod_base = OTHER; note = 2'O-methyl-uridine
  modified_base 8: mod_base = OTHER; note = 2' Fluoro-guanosine
  modified_base 9: mod_base = OTHER; note = 2'Fluoro-adenosine
  modified_base 10: mod_base = OTHER; note = 2'O-methyl-adenosine
  modified_base 11: mod_base = OTHER; note = 2'O-methyl-guanosine
  modified_base 12: mod_base = OTHER; note = 2'O-methyl-uridine
  modified_base 13: mod_base = OTHER; note = 2'O-methyl-adenosine
  modified_base 14: mod_base = OTHER; note = 2' Fluoro-guanosine
  modified_base 15: mod_base = OTHER; note = 2'O-methyl-adenosine
  modified_base 16: mod_base = OTHER; note = 2' Fluoro-uridine
  modified_base 17: mod_base = OTHER; note = 2'O-methyl-guanosine
  modified_base 18: mod_base = OTHER; note = 2'O-methyl-cytidine
  modified_base 19: mod_base = OTHER; note = 2'O-methyl-adenosine
  modified_base 20: mod_base = OTHER; note = 2'O-methyl-guanosine
  modified_base 21: mod_base = OTHER; note = 2'O-methyl-uridine
  modified_base 22: mod_base = OTHER; note = 2'O-methyl-uridine
  modified_base 23: mod_base = OTHER; note = 2'O-methyl-guanosine
  modified_base 1..2: mod_base = OTHER; note = phosphorothioate linkage
  modified_base 2..3: mod_base = OTHER; note = phosphorothioate linkage
  modified_base 21..22: mod_base = OTHER; note = phosphorothioate linkage
  modified_base 22..23: mod_base = OTHER; note = phosphorothioate linkage
  source 1..23: mol_type = other RNA
atcctttgaagtagatgcagttg

SEQ ID NO: 485 - RNA, 23 nt, synthetic construct
  misc_feature 1..23: note = siRNA sequence name:ETXS478
  modified_base 1: mod_base = OTHER; note = 2'O-methyl-adenosine
  modified_base 2: mod_base = OTHER; note = 2' Fluoro-cytidine
  modified_base 3: mod_base = OTHER; note = 2'O-methyl-uridine
  modified_base 4: mod_base = OTHER; note = 2' Fluoro-uridine
  modified_base 5: mod_base = OTHER; note = 2'O-methyl-guanosine
  modified_base 6: mod_base = OTHER; note = 2' Fluoro-uridine
  modified_base 7: mod_base = OTHER; note = 2'O-methyl-uridine
  modified_base 8: mod_base = OTHER; note = 2' Fluoro-cytidine
  modified_base 9: mod_base = OTHER; note = 2'Fluoro-adenosine
  modified_base 10: mod_base = OTHER; note = 2'O-methyl-uridine
  modified_base 11: mod_base = OTHER; note = 2'O-methyl-guanosine
  modified_base 12: mod_base = OTHER; note = 2'O-methyl-guanosine
  modified_base 13: mod_base = OTHER; note = 2'O-methyl-guanosine
  modified_base 14: mod_base = OTHER; note = 2' Fluoro-uridine
  modified_base 15: mod_base = OTHER; note = 2'O-methyl-cytidine
  modified_base 16: mod_base = OTHER; note = 2' Fluoro-uridine
  modified_base 17: mod_base = OTHER; note = 2'O-methyl-cytidine
  modified_base 18: mod_base = OTHER; note = 2'O-methyl-uridine
  modified_base 19: mod_base = OTHER; note = 2'O-methyl-cytidine
  modified_base 20: mod_base = OTHER; note = 2'O-methyl-cytidine
  modified_base 21: mod_base = OTHER; note = 2'O-methyl-cytidine
  modified_base 22: mod_base = OTHER; note = 2'O-methyl-uridine
  modified_base 23: mod_base = OTHER; note = 2'O-methyl-uridine
  modified_base 1..2: mod_base = OTHER; note = phosphorothioate linkage
  modified_base 2..3: mod_base = OTHER; note = phosphorothioate linkage
  modified_base 21..22: mod_base = OTHER; note = phosphorothioate linkage
  modified_base 22..23: mod_base = OTHER; note = phosphorothioate linkage
  source 1..23: mol_type = other RNA
acttgttcatgggtctctccctt

SEQ ID NO: 486 - RNA, 23 nt, synthetic construct
  misc_feature 1..23: note = siRNA sequence name:ETXS480
  modified_base 1: mod_base = OTHER; note = 2'O-methyl-uridine
  modified_base 2: mod_base = OTHER; note = 2' Fluoro-cytidine
  modified_base 3: mod_base = OTHER; note = 2'O-methyl-cytidine
  modified_base 4: mod_base = OTHER; note = 2'Fluoro-adenosine
  modified_base 5: mod_base = OTHER; note = 2'O-methyl-cytidine
  modified_base 6: mod_base = OTHER; note = 2' Fluoro-uridine
  modified_base 7: mod_base = OTHER; note = 2'O-methyl-guanosine
  modified_base 8: mod_base = OTHER; note = 2' Fluoro-guanosine
  modified_base 9: mod_base = OTHER; note = 2' Fluoro-guanosine
  modified_base 10: mod_base = OTHER; note = 2'O-methyl-adenosine
  modified_base 11: mod_base = OTHER; note = 2'O-methyl-adenosine
  modified_base 12: mod_base = OTHER; note = 2'O-methyl-uridine
  modified_base 13: mod_base = OTHER; note = 2'O-methyl-uridine
  modified_base 14: mod_base = OTHER; note = 2' Fluoro-uridine
  modified_base 15: mod_base = OTHER; note = 2'O-methyl-adenosine
  modified_base 16: mod_base = OTHER; note = 2' Fluoro-uridine
  modified_base 17: mod_base = OTHER; note = 2'O-methyl-uridine
  modified_base 18: mod_base = OTHER; note = 2'O-methyl-cytidine
  modified_base 19: mod_base = OTHER; note = 2'O-methyl-adenosine
  modified_base 20: mod_base = OTHER; note = 2'O-methyl-cytidine
  modified_base 21: mod_base = OTHER; note = 2'O-methyl-cytidine
  modified_base 22: mod_base = OTHER; note = 2'O-methyl-cytidine
  modified_base 23: mod_base = OTHER; note = 2'O-methyl-adenosine
  modified_base 1..2: mod_base = OTHER; note = phosphorothioate linkage
  modified_base 2..3: mod_base = OTHER; note = phosphorothioate linkage
  modified_base 21..22: mod_base = OTHER; note = phosphorothioate linkage
  modified_base 22..23: mod_base = OTHER; note = phosphorothioate linkage
  source 1..23: mol_type = other RNA
tccactgggaatttattcaccca

SEQ ID NO: 487 - RNA, 23 nt, synthetic construct
  misc_feature 1..23: note = siRNA sequence name:ETXS482
  modified_base 1: mod_base = OTHER; note = 2'O-methyl-uridine
  modified_base 2: mod_base = OTHER; note = 2' Fluoro-guanosine
  modified_base 3: mod_base = OTHER; note = 2'O-methyl-uridine
  modified_base 4: mod_base = OTHER; note = 2'Fluoro-adenosine
  modified_base 5: mod_base = OTHER; note = 2'O-methyl-cytidine
  modified_base 6: mod_base = OTHER; note = 2' Fluoro-cytidine
  modified_base 7: mod_base = OTHER; note = 2'O-methyl-cytidine
  modified_base 8: mod_base = OTHER; note = 2'Fluoro-adenosine
  modified_base 9: mod_base = OTHER; note = 2'Fluoro-adenosine
  modified_base 10: mod_base = OTHER; note = 2'O-methyl-adenosine
  modified_base 11: mod_base = OTHER; note = 2'O-methyl-adenosine
  modified_base 12: mod_base = OTHER; note = 2'O-methyl-uridine
  modified_base 13: mod_base = OTHER; note = 2'O-methyl-uridine
  modified_base 14: mod_base = OTHER; note = 2' Fluoro-cytidine
  modified_base 15: mod_base = OTHER; note = 2'O-methyl-cytidine
  modified_base 16: mod_base = OTHER; note = 2' Fluoro-uridine
  modified_base 17: mod_base = OTHER; note = 2'O-methyl-cytidine
  modified_base 18: mod_base = OTHER; note = 2'O-methyl-cytidine
  modified_base 19: mod_base = OTHER; note = 2'O-methyl-uridine
  modified_base 20: mod_base = OTHER; note = 2'O-methyl-guanosine
  modified_base 21: mod_base = OTHER; note = 2'O-methyl-adenosine
  modified_base 22: mod_base = OTHER; note = 2'O-methyl-adenosine
  modified_base 23: mod_base = OTHER; note = 2'O-methyl-guanosine
  modified_base 1..2: mod_base = OTHER; note = phosphorothioate linkage
  modified_base 2..3: mod_base = OTHER; note = phosphorothioate linkage
  modified_base 21..22: mod_base = OTHER; note = phosphorothioate linkage
  modified_base 22..23: mod_base = OTHER; note = phosphorothioate linkage
  source 1..23: mol_type = other RNA
tgtacccaaaattcctcctgaag

SEQ ID NO: 488 - RNA, 23 nt, synthetic construct
  misc_feature 1..23: note = siRNA sequence name:ETXS484
  modified_base 1: mod_base = OTHER; note = 2'O-methyl-uridine
  modified_base 2: mod_base = OTHER; note = 2' Fluoro-uridine
  modified_base 3: mod_base = OTHER; note = 2'O-methyl-cytidine
  modified_base 4: mod_base = OTHER; note = 2' Fluoro-cytidine
  modified_base 5: mod_base = OTHER; note = 2'O-methyl-cytidine
  modified_base 6: mod_base = OTHER; note = 2'Fluoro-adenosine
  modified_base 7: mod_base = OTHER; note = 2'O-methyl-uridine
  modified_base 8: mod_base = OTHER; note = 2' Fluoro-guanosine
  modified_base 9: mod_base = OTHER; note = 2'Fluoro-adenosine
  modified_base 10: mod_base = OTHER; note = 2'O-methyl-adenosine
  modified_base 11: mod_base = OTHER; note = 2'O-methyl-guanosine
  modified_base 12: mod_base = OTHER; note = 2'O-methyl-adenosine
  modified_base 13: mod_base = OTHER; note = 2'O-methyl-guanosine
  modified_base 14: mod_base = OTHER; note = 2' Fluoro-cytidine
  modified_base 15: mod_base = OTHER; note = 2'O-methyl-adenosine
  modified_base 16: mod_base = OTHER; note = 2' Fluoro-guanosine
  modified_base 17: mod_base = OTHER; note = 2'O-methyl-guanosine
  modified_base 18: mod_base = OTHER; note = 2'O-methyl-cytidine
  modified_base 19: mod_base = OTHER; note = 2'O-methyl-adenosine
  modified_base 20: mod_base = OTHER; note = 2'O-methyl-guanosine
  modified_base 21: mod_base = OTHER; note = 2'O-methyl-cytidine
  modified_base 22: mod_base = OTHER; note = 2'O-methyl-uridine
  modified_base 23: mod_base = OTHER; note = 2'O-methyl-guanosine
  modified_base 1..2: mod_base = OTHER; note = phosphorothioate linkage
  modified_base 2..3: mod_base = OTHER; note = phosphorothioate linkage
  modified_base 21..22: mod_base = OTHER; note = phosphorothioate linkage
  modified_base 22..23: mod_base = OTHER; note = phosphorothioate linkage
  source 1..23: mol_type = other RNA
ttcccatgaagagcaggcagctg

SEQ ID NO: 489 - RNA, 23 nt, synthetic construct
  misc_feature 1..23: note = siRNA sequence name:ETXS486
  modified_base 1: mod_base = OTHER; note = 2'O-methyl-uridine
  modified_base 2: mod_base = OTHER; note = 2' Fluoro-cytidine
  modified_base 3: mod_base = OTHER; note = 2'O-methyl-uridine
  modified_base 4: mod_base = OTHER; note = 2' Fluoro-uridine
  modified_base 5: mod_base = OTHER; note = 2'O-methyl-uridine
  modified_base 6: mod_base = OTHER; note = 2' Fluoro-uridine
  modified_base 7: mod_base = OTHER; note = 2'O-methyl-adenosine
  modified_base 8: mod_base = OTHER; note = 2' Fluoro-uridine
  modified_base 9: mod_base = OTHER; note = 2' Fluoro-guanosine
  modified_base 10: mod_base = OTHER; note = 2'O-methyl-adenosine
  modified_base 11: mod_base = OTHER; note = 2'O-methyl-guanosine
  modified_base 12: mod_base = OTHER; note = 2'O-methyl-guanosine
  modified_base 13: mod_base = OTHER; note = 2'O-methyl-cytidine
  modified_base 14: mod_base = OTHER; note = 2' Fluoro-cytidine
  modified_base 15: mod_base = OTHER; note = 2'O-methyl-cytidine
  modified_base 16: mod_base = OTHER; note = 2' Fluoro-uridine
  modified_base 17: mod_base = OTHER; note = 2'O-methyl-uridine
  modified_base 18: mod_base = OTHER; note = 2'O-methyl-guanosine
  modified_base 19: mod_base = OTHER; note = 2'O-methyl-guanosine
  modified_base 20: mod_base = OTHER; note = 2'O-methyl-uridine
  modified_base 21: mod_base = OTHER; note = 2'O-methyl-guanosine
  modified_base 22: mod_base = OTHER; note = 2'O-methyl-adenosine
  modified_base 23: mod_base = OTHER; note = 2'O-methyl-guanosine
  modified_base 1..2: mod_base = OTHER; note = phosphorothioate linkage
  modified_base 2..3: mod_base = OTHER; note = phosphorothioate linkage
  modified_base 21..22: mod_base = OTHER; note = phosphorothioate linkage
  modified_base 22..23: mod_base = OTHER; note = phosphorothioate linkage
  source 1..23: mol_type = other RNA
tcttttatgaggcccttggtgag

SEQ ID NO: 490 - RNA, 23 nt, synthetic construct
  misc_feature 1..23: note = siRNA sequence name:ETXS488
  modified_base 1: mod_base = OTHER; note = 2'O-methyl-adenosine
  modified_base 2: mod_base = OTHER; note = 2'Fluoro-adenosine
  modified_base 3: mod_base = OTHER; note = 2'O-methyl-cytidine
  modified_base 4: mod_base = OTHER; note = 2' Fluoro-uridine
  modified_base 5: mod_base = OTHER; note = 2'O-methyl-guanosine
  modified_base 6: mod_base = OTHER; note = 2' Fluoro-cytidine
  modified_base 7: mod_base = OTHER; note = 2'O-methyl-uridine
  modified_base 8: mod_base = OTHER; note = 2' Fluoro-uridine
  modified_base 9: mod_base = OTHER; note = 2' Fluoro-cytidine
  modified_base 10: mod_base = OTHER; note = 2'O-methyl-uridine
  modified_base 11: mod_base = OTHER; note = 2'O-methyl-guanosine
  modified_base 12: mod_base = OTHER; note = 2'O-methyl-guanosine
  modified_base 13: mod_base = OTHER; note = 2'O-methyl-adenosine
  modified_base 14: mod_base = OTHER; note = 2' Fluoro-uridine
  modified_base 15: mod_base = OTHER; note = 2'O-methyl-adenosine
  modified_base 16: mod_base = OTHER; note = 2' Fluoro-uridine
  modified_base 17: mod_base = OTHER; note = 2'O-methyl-adenosine
  modified_base 18: mod_base = OTHER; note = 2'O-methyl-adenosine
  modified_base 19: mod_base = OTHER; note = 2'O-methyl-adenosine
  modified_base 20: mod_base = OTHER; note = 2'O-methyl-guanosine
  modified_base 21: mod_base = OTHER; note = 2'O-methyl-guanosine
  modified_base 22: mod_base = OTHER; note = 2'O-methyl-uridine
  modified_base 23: mod_base = OTHER; note = 2'O-methyl-cytidine
  modified_base 1..2: mod_base = OTHER; note = phosphorothioate linkage
  modified_base 2..3: mod_base = OTHER; note = phosphorothioate linkage
  modified_base 21..22: mod_base = OTHER; note = phosphorothioate linkage
  modified_base 22..23: mod_base = OTHER; note = phosphorothioate linkage
  source 1..23: mol_type = other RNA
aactgcttctggatataaaggtc

SEQ ID NO: 491 - RNA, 23 nt, synthetic construct
  misc_feature 1..23: note = siRNA sequence name:ETXS490
  modified_base 1: mod_base = OTHER; note = 2'O-methyl-cytidine
  modified_base 2: mod_base = OTHER; note = 2' Fluoro-cytidine
  modified_base 3: mod_base = OTHER; note = 2'O-methyl-uridine
  modified_base 4: mod_base = OTHER; note = 2' Fluoro-uridine
  modified_base 5: mod_base = OTHER; note = 2'O-methyl-uridine
  modified_base 6: mod_base = OTHER; note = 2' Fluoro-guanosine
  modified_base 7: mod_base = OTHER; note = 2'O-methyl-adenosine
  modified_base 8: mod_base = OTHER; note = 2'Fluoro-adenosine
  modified_base 9: mod_base = OTHER; note = 2' Fluoro-guanosine
  modified_base 10: mod_base = OTHER; note = 2'O-methyl-uridine
  modified_base 11: mod_base = OTHER; note = 2'O-methyl-adenosine
  modified_base 12: mod_base = OTHER; note = 2'O-methyl-guanosine
  modified_base 13: mod_base = OTHER; note = 2'O-methyl-adenosine
  modified_base 14: mod_base = OTHER; note = 2' Fluoro-uridine
  modified_base 15: mod_base = OTHER; note = 2'O-methyl-guanosine
  modified_base 16: mod_base = OTHER; note = 2' Fluoro-cytidine
  modified_base 17: mod_base = OTHER; note = 2'O-methyl-adenosine
  modified_base 18: mod_base = OTHER; note = 2'O-methyl-guanosine
  modified_base 19: mod_base = OTHER; note = 2'O-methyl-uridine
  modified_base 20: mod_base = OTHER; note = 2'O-methyl-uridine
  modified_base 21: mod_base = OTHER; note = 2'O-methyl-guanosine
  modified_base 22: mod_base = OTHER; note = 2'O-methyl-adenosine
  modified_base 23: mod_base = OTHER; note = 2'O-methyl-guanosine
  modified_base 1..2: mod_base = OTHER; note = phosphorothioate linkage
  modified_base 2..3: mod_base = OTHER; note = phosphorothioate linkage
  modified_base 21..22: mod_base = OTHER; note = phosphorothioate linkage
  modified_base 22..23: mod_base = OTHER; note = phosphorothioate linkage
  source 1..23: mol_type = other RNA
cctttgaagtagatgcagttgag

SEQ ID NO: 492 - RNA, 23 nt, synthetic construct
  misc_feature 1..23: note = siRNA sequence name:ETXS492
  modified_base 1: mod_base = OTHER; note = 2'O-methyl-uridine
  modified_base 2: mod_base = OTHER; note = 2' Fluoro-uridine
  modified_base 3: mod_base = OTHER; note = 2'O-methyl-adenosine
  modified_base 4: mod_base = OTHER; note = 2'Fluoro-adenosine
  modified_base 5: mod_base = OTHER; note = 2'O-methyl-guanosine
  modified_base 6: mod_base = OTHER; note = 2'Fluoro-adenosine
  modified_base 7: mod_base = OTHER; note = 2'O-methyl-cytidine
  modified_base 8: mod_base = OTHER; note = 2' Fluoro-guanosine
  modified_base 9: mod_base = OTHER; note = 2' Fluoro-cytidine
  modified_base 10: mod_base = OTHER; note = 2'O-methyl-uridine
  modified_base 11: mod_base = OTHER; note = 2'O-methyl-guanosine
  modified_base 12: mod_base = OTHER; note = 2'O-methyl-guanosine
  modified_base 13: mod_base = OTHER; note = 2'O-methyl-adenosine
  modified_base 14: mod_base = OTHER; note = 2' Fluoro-uridine
  modified_base 15: mod_base = OTHER; note = 2'O-methyl-cytidine
  modified_base 16: mod_base = OTHER; note = 2' Fluoro-cytidine
  modified_base 17: mod_base = OTHER; note = 2'O-methyl-guanosine
  modified_base 18: mod_base = OTHER; note = 2'O-methyl-guanosine
  modified_base 19: mod_base = OTHER; note = 2'O-methyl-cytidine
  modified_base 20: mod_base = OTHER; note = 2'O-methyl-uridine
  modified_base 21: mod_base = OTHER; note = 2'O-methyl-cytidine
  modified_base 22: mod_base = OTHER; note = 2'O-methyl-uridine
  modified_base 23: mod_base = OTHER; note = 2'O-methyl-uridine
  modified_base 1..2: mod_base = OTHER; note = phosphorothioate linkage
  modified_base 2..3: mod_base = OTHER; note = phosphorothioate linkage
  modified_base 21..22: mod_base = OTHER; note = phosphorothioate linkage
  modified_base 22..23: mod_base = OTHER; note = phosphorothioate linkage
  source 1..23: mol_type = other RNA
ttaagacgctggatccggctctt

SEQ ID NO: 493 - RNA, 23 nt, synthetic construct
  misc_feature 1..23: note = siRNA sequence name:ETXS494
  modified_base 1: mod_base = OTHER; note = 2'O-methyl-guanosine
  modified_base 2: mod_base = OTHER; note = 2'Fluoro-adenosine
  modified_base 3: mod_base = OTHER; note = 2'O-methyl-guanosine
  modified_base 4: mod_base = OTHER; note = 2' Fluoro-guanosine
  modified_base 5: mod_base = OTHER; note = 2'O-methyl-adenosine
  modified_base 6: mod_base = OTHER; note = 2' Fluoro-uridine
  modified_base 7: mod_base = OTHER; note = 2'O-methyl-guanosine
  modified_base 8: mod_base = OTHER; note = 2' Fluoro-uridine
  modified_base 9: mod_base = OTHER; note = 2' Fluoro-uridine
  modified_base 10: mod_base = OTHER; note = 2'O-methyl-adenosine
  modified_base 11: mod_base = OTHER; note = 2'O-methyl-adenosine
  modified_base 12: mod_base = OTHER; note = 2'O-methyl-guanosine
  modified_base 13: mod_base = OTHER; note = 2'O-methyl-adenosine
  modified_base 14: mod_base = OTHER; note = 2' Fluoro-cytidine
  modified_base 15: mod_base = OTHER; note = 2'O-methyl-guanosine
  modified_base 16: mod_base = OTHER; note = 2' Fluoro-cytidine
  modified_base 17: mod_base = OTHER; note = 2'O-methyl-uridine
  modified_base 18: mod_base = OTHER; note = 2'O-methyl-guanosine
  modified_base 19: mod_base = OTHER; note = 2'O-methyl-guanosine
  modified_base 20: mod_base = OTHER; note = 2'O-methyl-adenosine
  modified_base 21: mod_base = OTHER; note = 2'O-methyl-uridine
  modified_base 22: mod_base = OTHER; note = 2'O-methyl-cytidine
  modified_base 23: mod_base = OTHER; note = 2'O-methyl-cytidine
  modified_base 1..2: mod_base = OTHER; note = phosphorothioate linkage
  modified_base 2..3: mod_base = OTHER; note = phosphorothioate linkage
  modified_base 21..22: mod_base = OTHER; note = phosphorothioate linkage
  modified_base 22..23: mod_base = OTHER; note = phosphorothioate linkage
  source 1..23: mol_type = other RNA
gaggatgttaagacgctggatcc

SEQ ID NO: 494 - RNA, 23 nt, synthetic construct
  misc_feature 1..23: note = siRNA sequence name:ETXS496
  modified_base 1: mod_base = OTHER; note = 2'O-methyl-uridine
  modified_base 2: mod_base = OTHER; note = 2' Fluoro-cytidine
  modified_base 3: mod_base = OTHER; note = 2'O-methyl-uridine
  modified_base 4: mod_base = OTHER; note = 2' Fluoro-guanosine
  modified_base 5: mod_base = OTHER; note = 2'O-methyl-uridine
  modified_base 6: mod_base = OTHER; note = 2' Fluoro-uridine
  modified_base 7: mod_base = OTHER; note = 2'O-methyl-uridine
  modified_base 8: mod_base = OTHER; note = 2' Fluoro-guanosine
  modified_base 9: mod_base = OTHER; note = 2' Fluoro-uridine
  modified_base 10: mod_base = OTHER; note = 2'O-methyl-cytidine
  modified_base 11: mod_base = OTHER; note = 2'O-methyl-adenosine
  modified_base 12: mod_base = OTHER; note = 2'O-methyl-uridine
  modified_base 13: mod_base = OTHER; note = 2'O-methyl-guanosine
  modified_base 14: mod_base = OTHER; note = 2' Fluoro-cytidine
  modified_base 15: mod_base = OTHER; note = 2'O-methyl-uridine
  modified_base 16: mod_base = OTHER; note = 2' Fluoro-uridine
  modified_base 17: mod_base = OTHER; note = 2'O-methyl-uridine
  modified_base 18: mod_base = OTHER; note = 2'O-methyl-uridine
  modified_base 19: mod_base = OTHER; note = 2'O-methyl-uridine
  modified_base 20: mod_base = OTHER; note = 2'O-methyl-uridine
  modified_base 21: mod_base = OTHER; note = 2'O-methyl-guanosine
  modified_base 22: mod_base = OTHER; note = 2'O-methyl-cytidine
  modified_base 23: mod_base = OTHER; note = 2'O-methyl-cytidine
  modified_base 1..2: mod_base = OTHER; note = phosphorothioate linkage
  modified_base 2..3: mod_base = OTHER; note = phosphorothioate linkage
  modified_base 21..22: mod_base = OTHER; note = phosphorothioate linkage
  modified_base 22..23: mod_base = OTHER; note = phosphorothioate linkage
  source 1..23: mol_type = other RNA
tctgtttgtcatgcttttttgcc

SEQ ID NO: 495 - RNA, 23 nt, synthetic construct
  misc_feature 1..23: note = siRNA sequence name:ETXS498
  modified_base 1: mod_base = OTHER; note = 2'O-methyl-guanosine
  modified_base 2: mod_base = OTHER; note = 2' Fluoro-uridine
  modified_base 3: mod_base = OTHER; note = 2'O-methyl-guanosine
  modified_base 4: mod_base = OTHER; note = 2' Fluoro-uridine
  modified_base 5: mod_base = OTHER; note = 2'O-methyl-adenosine
  modified_base 6: mod_base = OTHER; note = 2' Fluoro-cytidine
  modified_base 7: mod_base = OTHER; note = 2'O-methyl-cytidine
  modified_base 8: mod_base = OTHER; note = 2' Fluoro-cytidine
  modified_base 9: mod_base = OTHER; note = 2'Fluoro-adenosine
  modified_base 10: mod_base = OTHER; note = 2'O-methyl-adenosine
  modified_base 11: mod_base = OTHER; note = 2'O-methyl-adenosine
  modified_base 12: mod_base = OTHER; note = 2'O-methyl-adenosine
  modified_base 13: mod_base = OTHER; note = 2'O-methyl-uridine
  modified_base 14: mod_base = OTHER; note = 2' Fluoro-uridine
  modified_base 15: mod_base = OTHER; note = 2'O-methyl-cytidine
  modified_base 16: mod_base = OTHER; note = 2' Fluoro-cytidine
  modified_base 17: mod_base = OTHER; note = 2'O-methyl-uridine
  modified_base 18: mod_base = OTHER; note = 2'O-methyl-cytidine
  modified_base 19: mod_base = OTHER; note = 2'O-methyl-cytidine
  modified_base 20: mod_base = OTHER; note = 2'O-methyl-uridine
  modified_base 21: mod_base = OTHER; note = 2'O-methyl-guanosine
  modified_base 22: mod_base = OTHER; note = 2'O-methyl-adenosine
  modified_base 23: mod_base = OTHER; note = 2'O-methyl-adenosine
  modified_base 1..2: mod_base = OTHER; note = phosphorothioate linkage
  modified_base 2..3: mod_base = OTHER; note = phosphorothioate linkage
  modified_base 21..22: mod_base = OTHER; note = phosphorothioate linkage
  modified_base 22..23: mod_base = OTHER; note = phosphorothioate linkage
  source 1..23: mol_type = other RNA
gtgtacccaaaattcctcctgaa

SEQ ID NO: 496 - RNA, 23 nt, synthetic construct
  misc_feature 1..23: note = siRNA sequence name:ETXS500
  modified_base 1: mod_base = OTHER; note = 2'O-methyl-uridine
  modified_base 2: mod_base = OTHER; note = 2' Fluoro-uridine
  modified_base 3: mod_base = OTHER; note = 2'O-methyl-cytidine
  modified_base 4: mod_base = OTHER; note = 2'Fluoro-adenosine
  modified_base 5: mod_base = OTHER; note = 2'O-methyl-guanosine
  modified_base 6: mod_base = OTHER; note = 2' Fluoro-cytidine
  modified_base 7: mod_base = OTHER; note = 2'O-methyl-cytidine
  modified_base 8: mod_base = OTHER; note = 2' Fluoro-guanosine
  modified_base 9: mod_base = OTHER; note = 2' Fluoro-guanosine
  modified_base 10: mod_base = OTHER; note = 2'O-methyl-adenosine
  modified_base 11: mod_base = OTHER; note = 2'O-methyl-adenosine
  modified_base 12: mod_base = OTHER; note = 2'O-methyl-guanosine
  modified_base 13: mod_base = OTHER; note = 2'O-methyl-uridine
  modified_base 14: mod_base = OTHER; note = 2' Fluoro-uridine
  modified_base 15: mod_base = OTHER; note = 2'O-methyl-guanosine
  modified_base 16: mod_base = OTHER; note = 2' Fluoro-uridine
  modified_base 17: mod_base = OTHER; note = 2'O-methyl-guanosine
  modified_base 18: mod_base = OTHER; note = 2'O-methyl-guanosine
  modified_base 19: mod_base = OTHER; note = 2'O-methyl-uridine
  modified_base 20: mod_base = OTHER; note = 2'O-methyl-uridine
  modified_base 21: mod_base = OTHER; note = 2'O-methyl-guanosine
  modified_base 22: mod_base = OTHER; note = 2'O-methyl-uridine
  modified_base 23: mod_base = OTHER; note = 2'O-methyl-guanosine
  modified_base 1..2: mod_base = OTHER; note = phosphorothioate linkage
  modified_base 2..3: mod_base = OTHER; note = phosphorothioate linkage
  modified_base 21..22: mod_base = OTHER; note = phosphorothioate linkage
  modified_base 22..23: mod_base = OTHER; note = phosphorothioate linkage
  source 1..23: mol_type = other RNA
ttcagccggaagttgtggttgtg

SEQ ID NO: 497 - RNA, 23 nt, synthetic construct
  misc_feature 1..23: note = siRNA sequence name:ETXS502
  modified_base 1: mod_base = OTHER; note = 2'O-methyl-uridine
  modified_base 2: mod_base = OTHER; note = 2' Fluoro-guanosine
  modified_base 3: mod_base = OTHER; note = 2'O-methyl-uridine
  modified_base 4: mod_base = OTHER; note = 2' Fluoro-uridine
  modified_base 5: mod_base = OTHER; note = 2'O-methyl-uridine
  modified_base 6: mod_base = OTHER; note = 2' Fluoro-guanosine
  modified_base 7: mod_base = OTHER; note = 2'O-methyl-uridine
  modified_base 8: mod_base = OTHER; note = 2' Fluoro-cytidine
  modified_base 9: mod_base = OTHER; note = 2'Fluoro-adenosine
  modified_base 10: mod_base = OTHER; note = 2'O-methyl-uridine
  modified_base 11: mod_base = OTHER; note = 2'O-methyl-guanosine
  modified_base 12: mod_base = OTHER; note = 2'O-methyl-cytidine
  modified_base 13: mod_base = OTHER; note = 2'O-methyl-uridine
  modified_base 14: mod_base = OTHER; note = 2' Fluoro-uridine
  modified_base 15: mod_base = OTHER; note = 2'O-methyl-uridine
  modified_base 16: mod_base = OTHER; note = 2' Fluoro-uridine
  modified_base 17: mod_base = OTHER; note = 2'O-methyl-uridine
  modified_base 18: mod_base = OTHER; note = 2'O-methyl-uridine
  modified_base 19: mod_base = OTHER; note = 2'O-methyl-guanosine
  modified_base 20: mod_base = OTHER; note = 2'O-methyl-cytidine
  modified_base 21: mod_base = OTHER; note = 2'O-methyl-cytidine
  modified_base 22: mod_base = OTHER; note = 2'O-methyl-adenosine
  modified_base 23: mod_base = OTHER; note = 2'O-methyl-uridine
  modified_base 1..2: mod_base = OTHER; note = phosphorothioate linkage
  modified_base 2..3: mod_base = OTHER; note = phosphorothioate linkage
  modified_base 21..22: mod_base = OTHER; note = phosphorothioate linkage
  modified_base 22..23: mod_base = OTHER; note = phosphorothioate linkage
  source 1..23: mol_type = other RNA
tgtttgtcatgcttttttgccat

SEQ ID NO: 498 - RNA, 23 nt, synthetic construct
  misc_feature 1..23: note = siRNA sequence name:ETXS504
  modified_base 1: mod_base = OTHER; note = 2'O-methyl-adenosine
  modified_base 2: mod_base = OTHER; note = 2' Fluoro-uridine
  modified_base 3: mod_base = OTHER; note = 2'O-methyl-uridine
  modified_base 4: mod_base = OTHER; note = 2' Fluoro-uridine
  modified_base 5: mod_base = OTHER; note = 2'O-methyl-cytidine
  modified_base 6: mod_base = OTHER; note = 2' Fluoro-cytidine
  modified_base 7: mod_base = OTHER; note = 2'O-methyl-adenosine
  modified_base 8: mod_base = OTHER; note = 2' Fluoro-cytidine
  modified_base 9: mod_base = OTHER; note = 2' Fluoro-uridine
  modified_base 10: mod_base = OTHER; note = 2'O-methyl-guanosine
  modified_base 11: mod_base = OTHER; note = 2'O-methyl-guanosine
  modified_base 12: mod_base = OTHER; note = 2'O-methyl-guanosine
  modified_base 13: mod_base = OTHER; note = 2'O-methyl-adenosine
  modified_base 14: mod_base = OTHER; note = 2'Fluoro-adenosine
  modified_base 15: mod_base = OTHER; note = 2'O-methyl-uridine
  modified_base 16: mod_base = OTHER; note = 2' Fluoro-uridine
  modified_base 17: mod_base = OTHER; note = 2'O-methyl-uridine
  modified_base 18: mod_base = OTHER; note = 2'O-methyl-adenosine
  modified_base 19: mod_base = OTHER; note = 2'O-methyl-uridine
  modified_base 20: mod_base = OTHER; note = 2'O-methyl-uridine
  modified_base 21: mod_base = OTHER; note = 2'O-methyl-cytidine
  modified_base 22: mod_base = OTHER; note = 2'O-methyl-adenosine
  modified_base 23: mod_base = OTHER; note = 2'O-methyl-cytidine
  modified_base 1..2: mod_base = OTHER; note = phosphorothioate linkage
  modified_base 2..3: mod_base = OTHER; note = phosphorothioate linkage
  modified_base 21..22: mod_base = OTHER; note = phosphorothioate linkage
  modified_base 22..23: mod_base = OTHER; note = phosphorothioate linkage
  source 1..23: mol_type = other RNA
atttccactgggaatttattcac

SEQ ID NO: 499 - RNA, 23 nt, synthetic construct
  misc_feature 1..23: note = siRNA sequence name:ETXS506
  modified_base 1: mod_base = OTHER; note = 2'O-methyl-adenosine
  modified_base 2: mod_base = OTHER; note = 2' Fluoro-cytidine
  modified_base 3: mod_base = OTHER; note = 2'O-methyl-adenosine
  modified_base 4: mod_base = OTHER; note = 2'Fluoro-adenosine
  modified_base 5: mod_base = OTHER; note = 2'O-methyl-uridine
  modified_base 6: mod_base = OTHER; note = 2' Fluoro-uridine
  modified_base 7: mod_base = OTHER; note = 2'O-methyl-adenosine
  modified_base 8: mod_base = OTHER; note = 2' Fluoro-guanosine
  modified_base 9: mod_base = OTHER; note = 2' Fluoro-cytidine
  modified_base 10: mod_base = OTHER; note = 2'O-methyl-adenosine
  modified_base 11: mod_base = OTHER; note = 2'O-methyl-uridine
  modified_base 12: mod_base = OTHER; note = 2'O-methyl-guanosine
  modified_base 13: mod_base = OTHER; note = 2'O-methyl-cytidine
  modified_base 14: mod_base = OTHER; note = 2' Fluoro-uridine
  modified_base 15: mod_base = OTHER; note = 2'O-methyl-guanosine
  modified_base 16: mod_base = OTHER; note = 2'Fluoro-adenosine
  modified_base 17: mod_base = OTHER; note = 2'O-methyl-uridine
  modified_base 18: mod_base = OTHER; note = 2'O-methyl-guanosine
  modified_base 19: mod_base = OTHER; note = 2'O-methyl-cytidine
  modified_base 20: mod_base = OTHER; note = 2'O-methyl-cytidine
  modified_base 21: mod_base = OTHER; note = 2'O-methyl-cytidine
  modified_base 22: mod_base = OTHER; note = 2'O-methyl-cytidine
  modified_base 23: mod_base = OTHER; note = 2'O-methyl-cytidine
  modified_base 1..2: mod_base = OTHER; note = phosphorothioate linkage
  modified_base 2..3: mod_base = OTHER; note = phosphorothioate linkage
  modified_base 21..22: mod_base = OTHER; note = phosphorothioate linkage
  modified_base 22..23: mod_base = OTHER; note = phosphorothioate linkage
  source 1..23: mol_type = other RNA
acaattagcatgctgatgccccc

SEQ ID NO: 500 - RNA, 23 nt, synthetic construct
  misc_feature 1..23: note = siRNA sequence name:ETXS508
  modified_base 1: mod_base = OTHER; note = 2'O-methyl-guanosine
  modified_base 2: mod_base = OTHER; note = 2' Fluoro-uridine
  modified_base 3: mod_base = OTHER; note = 2'O-methyl-uridine
  modified_base 4: mod_base = OTHER; note = 2' Fluoro-cytidine
  modified_base 5: mod_base = OTHER; note = 2'O-methyl-uridine
  modified_base 6: mod_base = OTHER; note = 2' Fluoro-guanosine
  modified_base 7: mod_base = OTHER; note = 2'O-methyl-uridine
  modified_base 8: mod_base = OTHER; note = 2' Fluoro-uridine
  modified_base 9: mod_base = OTHER; note = 2' Fluoro-uridine
  modified_base 10: mod_base = OTHER; note = 2'O-methyl-guanosine
  modified_base 11: mod_base = OTHER; note = 2'O-methyl-uridine
  modified_base 12: mod_base = OTHER; note = 2'O-methyl-cytidine
  modified_base 13: mod_base = OTHER; note = 2'O-methyl-adenosine
  modified_base 14: mod_base = OTHER; note = 2' Fluoro-uridine
  modified_base 15: mod_base = OTHER; note = 2'O-methyl-guanosine
  modified_base 16: mod_base = OTHER; note = 2' Fluoro-cytidine
  modified_base 17: mod_base = OTHER; note = 2'O-methyl-uridine
  modified_base 18: mod_base = OTHER; note = 2'O-methyl-uridine
  modified_base 19: mod_base = OTHER; note = 2'O-methyl-uridine
  modified_base 20: mod_base = OTHER; note = 2'O-methyl-uridine
  modified_base 21: mod_base = OTHER; note = 2'O-methyl-uridine
  modified_base 22: mod_base = OTHER; note = 2'O-methyl-uridine
  modified_base 23: mod_base = OTHER; note = 2'O-methyl-guanosine
  modified_base 1..2: mod_base = OTHER; note = phosphorothioate linkage
  modified_base 2..3: mod_base = OTHER; note = phosphorothioate linkage
  modified_base 21..22: mod_base = OTHER; note = phosphorothioate linkage
  modified_base 22..23: mod_base = OTHER; note = phosphorothioate linkage
  source 1..23: mol_type = other RNA
gttctgtttgtcatgcttttttg

SEQ ID NO: 501 - RNA, 23 nt, synthetic construct
  misc_feature 1..23: note = siRNA sequence name:ETXS510
  modified_base 1: mod_base = OTHER; note = 2'O-methyl-guanosine
  modified_base 2: mod_base = OTHER; note = 2' Fluoro-guanosine
  modified_base 3: mod_base = OTHER; note = 2'O-methyl-cytidine
  modified_base 4: mod_base = OTHER; note = 2' Fluoro-cytidine
  modified_base 5: mod_base = OTHER; note = 2'O-methyl-uridine
  modified_base 6: mod_base = OTHER; note = 2' Fluoro-cytidine
  modified_base 7: mod_base = OTHER; note = 2'O-methyl-adenosine
  modified_base 8: mod_base = OTHER; note = 2' Fluoro-guanosine
  modified_base 9: mod_base = OTHER; note = 2' Fluoro-cytidine
  modified_base 10: mod_base = OTHER; note = 2'O-methyl-adenosine
  modified_base 11: mod_base = OTHER; note = 2'O-methyl-adenosine
  modified_base 12: mod_base = OTHER; note = 2'O-methyl-adenosine
  modified_base 13: mod_base = OTHER; note = 2'O-methyl-guanosine
  modified_base 14: mod_base = OTHER; note = 2' Fluoro-uridine
  modified_base 15: mod_base = OTHER; note = 2'O-methyl-adenosine
  modified_base 16: mod_base = OTHER; note = 2'Fluoro-adenosine
  modified_base 17: mod_base = OTHER; note = 2'O-methyl-uridine
  modified_base 18: mod_base = OTHER; note = 2'O-methyl-adenosine
  modified_base 19: mod_base = OTHER; note = 2'O-methyl-cytidine
  modified_base 20: mod_base = OTHER; note = 2'O-methyl-uridine
  modified_base 21: mod_base = OTHER; note = 2'O-methyl-cytidine
  modified_base 22: mod_base = OTHER; note = 2'O-methyl-uridine
  modified_base 23: mod_base = OTHER; note = 2'O-methyl-cytidine
  modified_base 1..2: mod_base = OTHER; note = phosphorothioate linkage
  modified_base 2..3: mod_base = OTHER; note = phosphorothioate linkage
  modified_base 21..22: mod_base = OTHER; note = phosphorothioate linkage
  modified_base 22..23: mod_base = OTHER; note = phosphorothioate linkage
  source 1..23: mol_type = other RNA
ggcctcagcaaagtaatactctc

SEQ ID NO: 502 - RNA, 23 nt, synthetic construct
  misc_feature 1..23: note = siRNA sequence name:ETXS512
  modified_base 1: mod_base = OTHER; note = 2'O-methyl-uridine
  modified_base 2: mod_base = OTHER; note = 2' Fluoro-uridine
  modified_base 3: mod_base = OTHER; note = 2'O-methyl-uridine
  modified_base 4: mod_base = OTHER; note = 2' Fluoro-cytidine
  modified_base 5: mod_base = OTHER; note = 2'O-methyl-cytidine
  modified_base 6: mod_base = OTHER; note = 2'Fluoro-adenosine
  modified_base 7: mod_base = OTHER; note = 2'O-methyl-cytidine
  modified_base 8: mod_base = OTHER; note = 2' Fluoro-uridine
  modified_base 9: mod_base = OTHER; note = 2' Fluoro-guanosine
  modified_base 10: mod_base = OTHER; note = 2'O-methyl-guanosine
  modified_base 11: mod_base = OTHER; note = 2'O-methyl-guanosine
  modified_base 12: mod_base = OTHER; note = 2'O-methyl-adenosine
  modified_base 13: mod_base = OTHER; note = 2'O-methyl-adenosine
  modified_base 14: mod_base = OTHER; note = 2' Fluoro-uridine
  modified_base 15: mod_base = OTHER; note = 2'O-methyl-uridine
  modified_base 16: mod_base = OTHER; note = 2' Fluoro-uridine
  modified_base 17: mod_base = OTHER; note = 2'O-methyl-adenosine
  modified_base 18: mod_base = OTHER; note = 2'O-methyl-uridine
  modified_base 19: mod_base = OTHER; note = 2'O-methyl-uridine
  modified_base 20: mod_base = OTHER; note = 2'O-methyl-cytidine
  modified_base 21: mod_base = OTHER; note = 2'O-methyl-adenosine
  modified_base 22: mod_base = OTHER; note = 2'O-methyl-cytidine
  modified_base 23: mod_base = OTHER; note = 2'O-methyl-cytidine
  modified_base 1..2: mod_base = OTHER; note = phosphorothioate linkage
  modified_base 2..3: mod_base = OTHER; note = phosphorothioate linkage
  modified_base 21..22: mod_base = OTHER; note = phosphorothioate linkage
  modified_base 22..23: mod_base = OTHER; note = phosphorothioate linkage
  source 1..23: mol_type = other RNA
tttccactgggaatttattcacc

SEQ ID NO: 503 - RNA, 23 nt, synthetic construct
  misc_feature 1..23: note = siRNA sequence name:ETXS514
  modified_base 1: mod_base = OTHER; note = 2'O-methyl-guanosine
  modified_base 2: mod_base = OTHER; note = 2'Fluoro-adenosine
  modified_base 3: mod_base = OTHER; note = 2'O-methyl-uridine
  modified_base 4: mod_base = OTHER; note = 2' Fluoro-cytidine
  modified_base 5: mod_base = OTHER; note = 2'O-methyl-cytidine
  modified_base 6: mod_base = OTHER; note = 2' Fluoro-uridine
  modified_base 7: mod_base = OTHER; note = 2'O-methyl-uridine
  modified_base 8: mod_base = OTHER; note = 2' Fluoro-uridine
  modified_base 9: mod_base = OTHER; note = 2' Fluoro-guanosine
  modified_base 10: mod_base = OTHER; note = 2'O-methyl-adenosine
  modified_base 11: mod_base = OTHER; note = 2'O-methyl-adenosine
  modified_base 12: mod_base = OTHER; note = 2'O-methyl-guanosine
  modified_base 13: mod_base = OTHER; note = 2'O-methyl-uridine
  modified_base 14: mod_base = OTHER; note = 2'Fluoro-adenosine
  modified_base 15: mod_base = OTHER; note = 2'O-methyl-guanosine
  modified_base 16: mod_base = OTHER; note = 2'Fluoro-adenosine
  modified_base 17: mod_base = OTHER; note = 2'O-methyl-uridine
  modified_base 18: mod_base = OTHER; note = 2'O-methyl-guanosine
  modified_base 19: mod_base = OTHER; note = 2'O-methyl-cytidine
  modified_base 20: mod_base = OTHER; note = 2'O-methyl-adenosine
  modified_base 21: mod_base = OTHER; note = 2'O-methyl-guanosine
  modified_base 22: mod_base = OTHER; note = 2'O-methyl-uridine
  modified_base 23: mod_base = OTHER; note = 2'O-methyl-uridine
  modified_base 1..2: mod_base = OTHER; note = phosphorothioate linkage
  modified_base 2..3: mod_base = OTHER; note = phosphorothioate linkage
  modified_base 21..22: mod_base = OTHER; note = phosphorothioate linkage
  modified_base 22..23: mod_base = OTHER; note = phosphorothioate linkage
  source 1..23: mol_type = other RNA
gatcctttgaagtagatgcagtt

SEQ ID NO: 504 - RNA, 23 nt, synthetic construct
  misc_feature 1..23: note = siRNA sequence name:ETXS516
  modified_base 1: mod_base = OTHER; note = 2'O-methyl-adenosine
  modified_base 2: mod_base = OTHER; note = 2' Fluoro-uridine
  modified_base 3: mod_base = OTHER; note = 2'O-methyl-cytidine
  modified_base 4: mod_base = OTHER; note = 2' Fluoro-cytidine
  modified_base 5: mod_base = OTHER; note = 2'O-methyl-uridine
  modified_base 6: mod_base = OTHER; note = 2' Fluoro-uridine
  modified_base 7: mod_base = OTHER; note = 2'O-methyl-uridine
  modified_base 8: mod_base = OTHER; note = 2' Fluoro-guanosine
  modified_base 9: mod_base = OTHER; note = 2'Fluoro-adenosine
  modified_base 10: mod_base = OTHER; note = 2'O-methyl-adenosine
  modified_base 11: mod_base = OTHER; note = 2'O-methyl-guanosine
  modified_base 12: mod_base = OTHER; note = 2'O-methyl-uridine
  modified_base 13: mod_base = OTHER; note = 2'O-methyl-adenosine
  modified_base 14: mod_base = OTHER; note = 2' Fluoro-guanosine
  modified_base 15: mod_base = OTHER; note = 2'O-methyl-adenosine
  modified_base 16: mod_base = OTHER; note = 2' Fluoro-uridine
  modified_base 17: mod_base = OTHER; note = 2'O-methyl-guanosine
  modified_base 18: mod_base = OTHER; note = 2'O-methyl-cytidine
  modified_base 19: mod_base = OTHER; note = 2'O-methyl-adenosine
  modified_base 20: mod_base = OTHER; note = 2'O-methyl-guanosine
  modified_base 21: mod_base = OTHER; note = 2'O-methyl-uridine
  modified_base 22: mod_base = OTHER; note = 2'O-methyl-uridine
  modified_base 23: mod_base = OTHER; note = 2'O-methyl-guanosine
  modified_base 1..2: mod_base = OTHER; note = phosphorothioate linkage
  modified_base 2..3: mod_base = OTHER; note = phosphorothioate linkage
  modified_base 21..22: mod_base = OTHER; note = phosphorothioate linkage
  modified_base 22..23: mod_base = OTHER; note = phosphorothioate linkage
  source 1..23: mol_type = other RNA
atcctttgaagtagatgcagttg

SEQ ID NO: 505 - RNA, 23 nt, synthetic construct
  misc_feature 1..23: note = siRNA sequence name:ETXS518
  modified_base 1: mod_base = OTHER; note = 2'O-methyl-adenosine
  modified_base 2: mod_base = OTHER; note = 2' Fluoro-cytidine
  modified_base 3: mod_base = OTHER; note = 2'O-methyl-uridine
  modified_base 4: mod_base = OTHER; note = 2' Fluoro-uridine
  modified_base 5: mod_base = OTHER; note = 2'O-methyl-guanosine
  modified_base 6: mod_base = OTHER; note = 2' Fluoro-uridine
  modified_base 7: mod_base = OTHER; note = 2'O-methyl-uridine
  modified_base 8: mod_base = OTHER; note = 2' Fluoro-cytidine
  modified_base 9: mod_base = OTHER; note = 2'Fluoro-adenosine
  modified_base 10: mod_base = OTHER; note = 2'O-methyl-uridine
  modified_base 11: mod_base = OTHER; note = 2'O-methyl-guanosine
  modified_base 12: mod_base = OTHER; note = 2'O-methyl-guanosine
  modified_base 13: mod_base = OTHER; note = 2'O-methyl-guanosine
  modified_base 14: mod_base = OTHER; note = 2' Fluoro-uridine
  modified_base 15: mod_base = OTHER; note = 2'O-methyl-cytidine
  modified_base 16: mod_base = OTHER; note = 2' Fluoro-uridine
  modified_base 17: mod_base = OTHER; note = 2'O-methyl-cytidine
  modified_base 18: mod_base = OTHER; note = 2'O-methyl-uridine
  modified_base 19: mod_base = OTHER; note = 2'O-methyl-cytidine
  modified_base 20: mod_base = OTHER; note = 2'O-methyl-cytidine
  modified_base 21: mod_base = OTHER; note = 2'O-methyl-cytidine
  modified_base 22: mod_base = OTHER; note = 2'O-methyl-uridine
  modified_base 23: mod_base = OTHER; note = 2'O-methyl-uridine
  modified_base 1..2: mod_base = OTHER; note = phosphorothioate linkage
  modified_base 2..3: mod_base = OTHER; note = phosphorothioate linkage
  modified_base 21..22: mod_base = OTHER; note = phosphorothioate linkage
  modified_base 22..23: mod_base = OTHER; note = phosphorothioate linkage
  source 1..23: mol_type = other RNA
acttgttcatgggtctctccctt

SEQ ID NO: 506 - RNA, 23 nt, synthetic construct
  misc_feature 1..23: note = siRNA sequence name:ETXS520
  modified_base 1: mod_base = OTHER; note = 2'O-methyl-uridine
  modified_base 2: mod_base = OTHER; note = 2' Fluoro-cytidine
  modified_base 3: mod_base = OTHER; note = 2'O-methyl-cytidine
  modified_base 4: mod_base = OTHER; note = 2'Fluoro-adenosine
  modified_base 5: mod_base = OTHER; note = 2'O-methyl-cytidine
  modified_base 6: mod_base = OTHER; note = 2' Fluoro-uridine
  modified_base 7: mod_base = OTHER; note = 2'O-methyl-guanosine
  modified_base 8: mod_base = OTHER; note = 2' Fluoro-guanosine
  modified_base 9: mod_base = OTHER; note = 2' Fluoro-guanosine
  modified_base 10: mod_base = OTHER; note = 2'O-methyl-adenosine
  modified_base 11: mod_base = OTHER; note = 2'O-methyl-adenosine
  modified_base 12: mod_base = OTHER; note = 2'O-methyl-uridine
  modified_base 13: mod_base = OTHER; note = 2'O-methyl-uridine
  modified_base 14: mod_base = OTHER; note = 2' Fluoro-uridine
  modified_base 15: mod_base = OTHER; note = 2'O-methyl-adenosine
  modified_base 16: mod_base = OTHER; note = 2' Fluoro-uridine
  modified_base 17: mod_base = OTHER; note = 2'O-methyl-uridine
  modified_base 18: mod_base = OTHER; note = 2'O-methyl-cytidine
  modified_base 19: mod_base = OTHER; note = 2'O-methyl-adenosine
  modified_base 20: mod_base = OTHER; note = 2'O-methyl-cytidine
  modified_base 21: mod_base = OTHER; note = 2'O-methyl-cytidine
  modified_base 22: mod_base = OTHER; note = 2'O-methyl-cytidine
  modified_base 23: mod_base = OTHER; note = 2'O-methyl-adenosine
  modified_base 1..2: mod_base = OTHER; note = phosphorothioate linkage
  modified_base 2..3: mod_base = OTHER; note = phosphorothioate linkage
  modified_base 21..22: mod_base = OTHER; note = phosphorothioate linkage
  modified_base 22..23: mod_base = OTHER; note = phosphorothioate linkage
  source 1..23: mol_type = other RNA
tccactgggaatttattcaccca

SEQ ID NO: 507 - RNA, 23 nt, synthetic construct
  misc_feature 1..23: note = siRNA sequence name:ETXS522
  modified_base 1: mod_base = OTHER; note = 2'O-methyl-uridine
  modified_base 2: mod_base = OTHER; note = 2' Fluoro-guanosine
  modified_base 3: mod_base = OTHER; note = 2'O-methyl-uridine
  modified_base 4: mod_base = OTHER; note = 2'Fluoro-adenosine
  modified_base 5: mod_base = OTHER; note = 2'O-methyl-cytidine
  modified_base 6: mod_base = OTHER; note = 2' Fluoro-cytidine
  modified_base 7: mod_base = OTHER; note = 2'O-methyl-cytidine
  modified_base 8: mod_base = OTHER; note = 2'Fluoro-adenosine
  modified_base 9: mod_base = OTHER; note = 2'Fluoro-adenosine
  modified_base 10: mod_base = OTHER; note = 2'O-methyl-adenosine
  modified_base 11: mod_base = OTHER; note = 2'O-methyl-adenosine
  modified_base 12: mod_base = OTHER; note = 2'O-methyl-uridine
  modified_base 13: mod_base = OTHER; note = 2'O-methyl-uridine
  modified_base 14: mod_base = OTHER; note = 2' Fluoro-cytidine
  modified_base 15: mod_base = OTHER; note = 2'O-methyl-cytidine
  modified_base 16: mod_base = OTHER; note = 2' Fluoro-uridine
  modified_base 17: mod_base = OTHER; note = 2'O-methyl-cytidine
  modified_base 18: mod_base = OTHER; note = 2'O-methyl-cytidine
  modified_base 19: mod_base = OTHER; note = 2'O-methyl-uridine
  modified_base 20: mod_base = OTHER; note = 2'O-methyl-guanosine
  modified_base 21: mod_base = OTHER; note = 2'O-methyl-adenosine
  modified_base 22: mod_base = OTHER; note = 2'O-methyl-adenosine
  modified_base 23: mod_base = OTHER; note = 2'O-methyl-guanosine
  modified_base 1..2: mod_base = OTHER; note = phosphorothioate linkage
  modified_base 2..3: mod_base = OTHER; note = phosphorothioate linkage
  modified_base 21..22: mod_base = OTHER; note = phosphorothioate linkage
  modified_base 22..23: mod_base = OTHER; note = phosphorothioate linkage
  source 1..23: mol_type = other RNA
tgtacccaaaattcctcctgaag

SEQ ID NO: 508 - RNA, 23 nt, synthetic construct
  misc_feature 1..23: note = siRNA sequence name:ETXS524
  modified_base 1: mod_base = OTHER; note = 2'O-methyl-uridine
  modified_base 2: mod_base = OTHER; note = 2' Fluoro-uridine
  modified_base 3: mod_base = OTHER; note = 2'O-methyl-cytidine
  modified_base 4: mod_base = OTHER; note = 2' Fluoro-cytidine
  modified_base 5: mod_base = OTHER; note = 2'O-methyl-cytidine
  modified_base 6: mod_base = OTHER; note = 2'Fluoro-adenosine
  modified_base 7: mod_base = OTHER; note = 2'O-methyl-uridine
  modified_base 8: mod_base = OTHER; note = 2' Fluoro-guanosine
  modified_base 9: mod_base = OTHER; note = 2'Fluoro-adenosine
  modified_base 10: mod_base = OTHER; note = 2'O-methyl-adenosine
  modified_base 11: mod_base = OTHER; note = 2'O-methyl-guanosine
  modified_base 12: mod_base = OTHER; note = 2'O-methyl-adenosine
  modified_base 13: mod_base = OTHER; note = 2'O-methyl-guanosine
  modified_base 14: mod_base = OTHER; note = 2' Fluoro-cytidine
  modified_base 15: mod_base = OTHER; note = 2'O-methyl-adenosine
  modified_base 16: mod_base = OTHER; note = 2' Fluoro-guanosine
  modified_base 17: mod_base = OTHER; note = 2'O-methyl-guanosine
  modified_base 18: mod_base = OTHER; note = 2'O-methyl-cytidine
  modified_base 19: mod_base = OTHER; note = 2'O-methyl-adenosine
  modified_base 20: mod_base = OTHER; note = 2'O-methyl-guanosine
  modified_base 21: mod_base = OTHER; note = 2'O-methyl-cytidine
  modified_base 22: mod_base = OTHER; note = 2'O-methyl-uridine
  modified_base 23: mod_base = OTHER; note = 2'O-methyl-guanosine
  modified_base 1..2: mod_base = OTHER; note = phosphorothioate linkage
  modified_base 2..3: mod_base = OTHER; note = phosphorothioate linkage
  modified_base 21..22: mod_base = OTHER; note = phosphorothioate linkage
  modified_base 22..23: mod_base = OTHER; note = phosphorothioate linkage
  source 1..23: mol_type = other RNA
ttcccatgaagagcaggcagctg

SEQ ID NO: 509 - RNA, 23 nt, synthetic construct
  misc_feature 1..23: note = siRNA sequence name:ETXS526
  modified_base 1: mod_base = OTHER; note = 2'O-methyl-uridine
  modified_base 2: mod_base = OTHER; note = 2' Fluoro-cytidine
  modified_base 3: mod_base = OTHER; note = 2'O-methyl-uridine
  modified_base 4: mod_base = OTHER; note = 2' Fluoro-uridine
  modified_base 5: mod_base = OTHER; note = 2'O-methyl-uridine
  modified_base 6: mod_base = OTHER; note = 2' Fluoro-uridine
  modified_base 7: mod_base = OTHER; note = 2'O-methyl-adenosine
  modified_base 8: mod_base = OTHER; note = 2' Fluoro-uridine
  modified_base 9: mod_base = OTHER; note = 2' Fluoro-guanosine
  modified_base 10: mod_base = OTHER; note = 2'O-methyl-adenosine
  modified_base 11: mod_base = OTHER; note = 2'O-methyl-guanosine
  modified_base 12: mod_base = OTHER; note = 2'O-methyl-guanosine
  modified_base 13: mod_base = OTHER; note = 2'O-methyl-cytidine
  modified_base 14: mod_base = OTHER; note = 2' Fluoro-cytidine
  modified_base 15: mod_base = OTHER; note = 2'O-methyl-cytidine
  modified_base 16: mod_base = OTHER; note = 2' Fluoro-uridine
  modified_base 17: mod_base = OTHER; note = 2'O-methyl-uridine
  modified_base 18: mod_base = OTHER; note = 2'O-methyl-guanosine
  modified_base 19: mod_base = OTHER; note = 2'O-methyl-guanosine
  modified_base 20: mod_base = OTHER; note = 2'O-methyl-uridine
  modified_base 21: mod_base = OTHER; note = 2'O-methyl-guanosine
  modified_base 22: mod_base = OTHER; note = 2'O-methyl-adenosine
  modified_base 23: mod_base = OTHER; note = 2'O-methyl-guanosine
  modified_base 1..2: mod_base = OTHER; note = phosphorothioate linkage
  modified_base 2..3: mod_base = OTHER; note = phosphorothioate linkage
  modified_base 21..22: mod_base = OTHER; note = phosphorothioate linkage
  modified_base 22..23: mod_base = OTHER; note = phosphorothioate linkage
  source 1..23: mol_type = other RNA
tcttttatgaggcccttggtgag

SEQ ID NO: 510 - RNA, 23 nt, synthetic construct
  misc_feature 1..23: note = siRNA sequence name:ETXS528
  modified_base 1: mod_base = OTHER; note = 2'O-methyl-adenosine
  modified_base 2: mod_base = OTHER; note = 2'Fluoro-adenosine
  modified_base 3: mod_base = OTHER; note = 2'O-methyl-cytidine
  modified_base 4: mod_base = OTHER; note = 2' Fluoro-uridine
  modified_base 5: mod_base = OTHER; note = 2'O-methyl-guanosine
  modified_base 6: mod_base = OTHER; note = 2' Fluoro-cytidine
  modified_base 7: mod_base = OTHER; note = 2'O-methyl-uridine
  modified_base 8: mod_base = OTHER; note = 2' Fluoro-uridine
  modified_base 9: mod_base = OTHER; note = 2' Fluoro-cytidine
  modified_base 10: mod_base = OTHER; note = 2'O-methyl-uridine
  modified_base 11: mod_base = OTHER; note = 2'O-methyl-guanosine
  modified_base 12: mod_base = OTHER; note = 2'O-methyl-guanosine
  modified_base 13: mod_base = OTHER; note = 2'O-methyl-adenosine
  modified_base 14: mod_base = OTHER; note = 2' Fluoro-uridine
  modified_base 15: mod_base = OTHER; note = 2'O-methyl-adenosine
  modified_base 16: mod_base = OTHER; note = 2' Fluoro-uridine
  modified_base 17: mod_base = OTHER; note = 2'O-methyl-adenosine
  modified_base 18: mod_base = OTHER; note = 2'O-methyl-adenosine
  modified_base 19: mod_base = OTHER; note = 2'O-methyl-adenosine
  modified_base 20: mod_base = OTHER; note = 2'O-methyl-guanosine
  modified_base 21: mod_base = OTHER; note = 2'O-methyl-guanosine
  modified_base 22: mod_base = OTHER; note = 2'O-methyl-uridine
  modified_base 23: mod_base = OTHER; note = 2'O-methyl-cytidine
  modified_base 1..2: mod_base = OTHER; note = phosphorothioate linkage
  modified_base 2..3: mod_base = OTHER; note = phosphorothioate linkage
  modified_base 21..22: mod_base = OTHER; note = phosphorothioate linkage
  modified_base 22..23: mod_base = OTHER; note = phosphorothioate linkage
  source 1..23: mol_type = other RNA
aactgcttctggatataaaggtc

SEQ ID NO: 511 - RNA, 23 nt, synthetic construct
  misc_feature 1..23: note = siRNA sequence name:ETXS530
  modified_base 1: mod_base = OTHER; note = 2'O-methyl-cytidine
  modified_base 2: mod_base = OTHER; note = 2' Fluoro-cytidine
  modified_base 3: mod_base = OTHER; note = 2'O-methyl-uridine
  modified_base 4: mod_base = OTHER; note = 2' Fluoro-uridine
  modified_base 5: mod_base = OTHER; note = 2'O-methyl-uridine
  modified_base 6: mod_base = OTHER; note = 2' Fluoro-guanosine
  modified_base 7: mod_base = OTHER; note = 2'O-methyl-adenosine
  modified_base 8: mod_base = OTHER; note = 2'Fluoro-adenosine
  modified_base 9: mod_base = OTHER; note = 2' Fluoro-guanosine
  modified_base 10: mod_base = OTHER; note = 2'O-methyl-uridine
  modified_base 11: mod_base = OTHER; note = 2'O-methyl-adenosine
  modified_base 12: mod_base = OTHER; note = 2'O-methyl-guanosine
  modified_base 13: mod_base = OTHER; note = 2'O-methyl-adenosine
  modified_base 14: mod_base = OTHER; note = 2' Fluoro-uridine
  modified_base 15: mod_base = OTHER; note = 2'O-methyl-guanosine
  modified_base 16: mod_base = OTHER; note = 2' Fluoro-cytidine
  modified_base 17: mod_base = OTHER; note = 2'O-methyl-adenosine
  modified_base 18: mod_base = OTHER; note = 2'O-methyl-guanosine
  modified_base 19: mod_base = OTHER; note = 2'O-methyl-uridine
  modified_base 20: mod_base = OTHER; note = 2'O-methyl-uridine
  modified_base 21: mod_base = OTHER; note = 2'O-methyl-guanosine
  modified_base 22: mod_base = OTHER; note = 2'O-methyl-adenosine
  modified_base 23: mod_base = OTHER; note = 2'O-methyl-guanosine
  modified_base 1..2: mod_base = OTHER; note = phosphorothioate linkage
  modified_base 2..3: mod_base = OTHER; note = phosphorothioate linkage
  modified_base 21..22: mod_base = OTHER; note = phosphorothioate linkage
  modified_base 22..23: mod_base = OTHER; note = phosphorothioate linkage
  source 1..23: mol_type = other RNA
cctttgaagtagatgcagttgag

SEQ ID NO: 512 - RNA, 23 nt, synthetic construct
  misc_feature 1..23: note = siRNA sequence name:ETXS532
  modified_base 1: mod_base = OTHER; note = 2'O-methyl-uridine
  modified_base 2: mod_base = OTHER; note = 2' Fluoro-uridine
  modified_base 3: mod_base = OTHER; note = 2'O-methyl-adenosine
  modified_base 4: mod_base = OTHER; note = 2'Fluoro-adenosine
  modified_base 5: mod_base = OTHER; note = 2'O-methyl-guanosine
  modified_base 6: mod_base = OTHER; note = 2'Fluoro-adenosine
  modified_base 7: mod_base = OTHER; note = 2'O-methyl-cytidine
  modified_base 8: mod_base = OTHER; note = 2' Fluoro-guanosine
  modified_base 9: mod_base = OTHER; note = 2' Fluoro-cytidine
  modified_base 10: mod_base = OTHER; note = 2'O-methyl-uridine
  modified_base 11: mod_base = OTHER; note = 2'O-methyl-guanosine
  modified_base 12: mod_base = OTHER; note = 2'O-methyl-guanosine
  modified_base 13: mod_base = OTHER; note = 2'O-methyl-adenosine
  modified_base 14: mod_base = OTHER; note = 2' Fluoro-uridine
  modified_base 15: mod_base = OTHER; note = 2'O-methyl-cytidine
  modified_base 16: mod_base = OTHER; note = 2' Fluoro-cytidine
  modified_base 17: mod_base = OTHER; note = 2'O-methyl-guanosine
  modified_base 18: mod_base = OTHER; note = 2'O-methyl-guanosine
  modified_base 19: mod_base = OTHER; note = 2'O-methyl-cytidine
  modified_base 20: mod_base = OTHER; note = 2'O-methyl-uridine
  modified_base 21: mod_base = OTHER; note = 2'O-methyl-cytidine
  modified_base 22: mod_base = OTHER; note = 2'O-methyl-uridine
  modified_base 23: mod_base = OTHER; note = 2'O-methyl-uridine
  modified_base 1..2: mod_base = OTHER; note = phosphorothioate linkage
  modified_base 2..3: mod_base = OTHER; note = phosphorothioate linkage
  modified_base 21..22: mod_base = OTHER; note = phosphorothioate linkage
  modified_base 22..23: mod_base = OTHER; note = phosphorothioate linkage
  source 1..23: mol_type = other RNA
ttaagacgctggatccggctctt

SEQ ID NO: 513 - RNA, 23 nt, synthetic construct
  misc_feature 1..23: note = siRNA sequence name:ETXS534
  modified_base 1: mod_base = OTHER; note = 2'O-methyl-guanosine
  modified_base 2: mod_base = OTHER; note = 2'Fluoro-adenosine
  modified_base 3: mod_base = OTHER; note = 2'O-methyl-guanosine
  modified_base 4: mod_base = OTHER; note = 2' Fluoro-guanosine
  modified_base 5: mod_base = OTHER; note = 2'O-methyl-adenosine
  modified_base 6: mod_base = OTHER; note = 2' Fluoro-uridine
  modified_base 7: mod_base = OTHER; note = 2'O-methyl-guanosine
  modified_base 8: mod_base = OTHER; note = 2' Fluoro-uridine
  modified_base 9: mod_base = OTHER; note = 2' Fluoro-uridine
  modified_base 10: mod_base = OTHER; note = 2'O-methyl-adenosine
  modified_base 11: mod_base = OTHER; note = 2'O-methyl-adenosine
  modified_base 12: mod_base = OTHER; note = 2'O-methyl-guanosine
  modified_base 13: mod_base = OTHER; note = 2'O-methyl-adenosine
  modified_base 14: mod_base = OTHER; note = 2' Fluoro-cytidine
  modified_base 15: mod_base = OTHER; note = 2'O-methyl-guanosine
  modified_base 16: mod_base = OTHER; note = 2' Fluoro-cytidine
  modified_base 17: mod_base = OTHER; note = 2'O-methyl-uridine
  modified_base 18: mod_base = OTHER; note = 2'O-methyl-guanosine
  modified_base 19: mod_base = OTHER; note = 2'O-methyl-guanosine
  modified_base 20: mod_base = OTHER; note = 2'O-methyl-adenosine
  modified_base 21: mod_base = OTHER; note = 2'O-methyl-uridine
  modified_base 22: mod_base = OTHER; note = 2'O-methyl-cytidine
  modified_base 23: mod_base = OTHER; note = 2'O-methyl-cytidine
  modified_base 1..2: mod_base = OTHER; note = phosphorothioate linkage
  modified_base 2..3: mod_base = OTHER; note = phosphorothioate linkage
  modified_base 21..22: mod_base = OTHER; note = phosphorothioate linkage
  modified_base 22..23: mod_base = OTHER; note = phosphorothioate linkage
  source 1..23: mol_type = other RNA
gaggatgttaagacgctggatcc

SEQ ID NO: 514 - RNA, 23 nt, synthetic construct
  misc_feature 1..23: note = siRNA sequence name:ETXS536
  modified_base 1: mod_base = OTHER; note = 2'O-methyl-uridine
  modified_base 2: mod_base = OTHER; note = 2' Fluoro-cytidine
  modified_base 3: mod_base = OTHER; note = 2'O-methyl-uridine
  modified_base 4: mod_base = OTHER; note = 2' Fluoro-guanosine
  modified_base 5: mod_base = OTHER; note = 2'O-methyl-uridine
  modified_base 6: mod_base = OTHER; note = 2' Fluoro-uridine
  modified_base 7: mod_base = OTHER; note = 2'O-methyl-uridine
  modified_base 8: mod_base = OTHER; note = 2' Fluoro-guanosine
  modified_base 9: mod_base = OTHER; note = 2' Fluoro-uridine
  modified_base 10: mod_base = OTHER; note = 2'O-methyl-cytidine
  modified_base 11: mod_base = OTHER; note = 2'O-methyl-adenosine
  modified_base 12: mod_base = OTHER; note = 2'O-methyl-uridine
  modified_base 13: mod_base = OTHER; note = 2'O-methyl-guanosine
  modified_base 14: mod_base = OTHER; note = 2' Fluoro-cytidine
  modified_base 15: mod_base = OTHER; note = 2'O-methyl-uridine
  modified_base 16: mod_base = OTHER; note = 2' Fluoro-uridine
  modified_base 17: mod_base = OTHER; note = 2'O-methyl-uridine
  modified_base 18: mod_base = OTHER; note = 2'O-methyl-uridine
  modified_base 19: mod_base = OTHER; note = 2'O-methyl-uridine
  modified_base 20: mod_base = OTHER; note = 2'O-methyl-uridine
  modified_base 21: mod_base = OTHER; note = 2'O-methyl-guanosine
  modified_base 22: mod_base = OTHER; note = 2'O-methyl-cytidine
  modified_base 23: mod_base = OTHER; note = 2'O-methyl-cytidine
  modified_base 1..2: mod_base = OTHER; note = phosphorothioate linkage
  modified_base 2..3: mod_base = OTHER; note = phosphorothioate linkage
  modified_base 21..22: mod_base = OTHER; note = phosphorothioate linkage
  modified_base 22..23: mod_base = OTHER; note = phosphorothioate linkage
  source 1..23: mol_type = other RNA
tctgtttgtcatgcttttttgcc

SEQ ID NO: 515 - RNA, 23 nt, synthetic construct
  misc_feature 1..23: note = siRNA sequence name:ETXS538
  modified_base 1: mod_base = OTHER; note = 2'O-methyl-guanosine
  modified_base 2: mod_base = OTHER; note = 2' Fluoro-uridine
  modified_base 3: mod_base = OTHER; note = 2'O-methyl-guanosine
  modified_base 4: mod_base = OTHER; note = 2' Fluoro-uridine
  modified_base 5: mod_base = OTHER; note = 2'O-methyl-adenosine
  modified_base 6: mod_base = OTHER; note = 2' Fluoro-cytidine
  modified_base 7: mod_base = OTHER; note = 2'O-methyl-cytidine
  modified_base 8: mod_base = OTHER; note = 2' Fluoro-cytidine
  modified_base 9: mod_base = OTHER; note = 2'Fluoro-adenosine
  modified_base 10: mod_base = OTHER; note = 2'O-methyl-adenosine
  modified_base 11: mod_base = OTHER; note = 2'O-methyl-adenosine
  modified_base 12: mod_base = OTHER; note = 2'O-methyl-adenosine
  modified_base 13: mod_base = OTHER; note = 2'O-methyl-uridine
  modified_base 14: mod_base = OTHER; note = 2' Fluoro-uridine
  modified_base 15: mod_base = OTHER; note = 2'O-methyl-cytidine
  modified_base 16: mod_base = OTHER; note = 2' Fluoro-cytidine
  modified_base 17: mod_base = OTHER; note = 2'O-methyl-uridine
  modified_base 18: mod_base = OTHER; note = 2'O-methyl-cytidine
  modified_base 19: mod_base = OTHER; note = 2'O-methyl-cytidine
  modified_base 20: mod_base = OTHER; note = 2'O-methyl-uridine
  modified_base 21: mod_base = OTHER; note = 2'O-methyl-guanosine
  modified_base 22: mod_base = OTHER; note = 2'O-methyl-adenosine
  modified_base 23: mod_base = OTHER; note = 2'O-methyl-adenosine
  modified_base 1..2: mod_base = OTHER; note = phosphorothioate linkage
  modified_base 2..3: mod_base = OTHER; note = phosphorothioate linkage
  modified_base 21..22: mod_base = OTHER; note = phosphorothioate linkage
  modified_base 22..23: mod_base = OTHER; note = phosphorothioate linkage
  source 1..23: mol_type = other RNA
gtgtacccaaaattcctcctgaa

SEQ ID NO: 516 - RNA, 23 nt, synthetic construct
  misc_feature 1..23: note = siRNA sequence name:ETXS540
  modified_base 1: mod_base = OTHER; note = 2'O-methyl-uridine
  modified_base 2: mod_base = OTHER; note = 2' Fluoro-uridine
  modified_base 3: mod_base = OTHER; note = 2'O-methyl-cytidine
  modified_base 4: mod_base = OTHER; note = 2'Fluoro-adenosine
  modified_base 5: mod_base = OTHER; note = 2'O-methyl-guanosine
  modified_base 6: mod_base = OTHER; note = 2' Fluoro-cytidine
  modified_base 7: mod_base = OTHER; note = 2'O-methyl-cytidine
  modified_base 8: mod_base = OTHER; note = 2' Fluoro-guanosine
  modified_base 9: mod_base = OTHER; note = 2' Fluoro-guanosine
  modified_base 10: mod_base = OTHER; note = 2'O-methyl-adenosine
  modified_base 11: mod_base = OTHER; note = 2'O-methyl-adenosine
  modified_base 12: mod_base = OTHER; note = 2'O-methyl-guanosine
  modified_base 13: mod_base = OTHER; note = 2'O-methyl-uridine
  modified_base 14: mod_base = OTHER; note = 2' Fluoro-uridine
  modified_base 15: mod_base = OTHER; note = 2'O-methyl-guanosine
  modified_base 16: mod_base = OTHER; note = 2' Fluoro-uridine
  modified_base 17: mod_base = OTHER; note = 2'O-methyl-guanosine
  modified_base 18: mod_base = OTHER; note = 2'O-methyl-guanosine
  modified_base 19: mod_base = OTHER; note = 2'O-methyl-uridine
  modified_base 20: mod_base = OTHER; note = 2'O-methyl-uridine
  modified_base 21: mod_base = OTHER; note = 2'O-methyl-guanosine
  modified_base 22: mod_base = OTHER; note = 2'O-methyl-uridine
  modified_base 23: mod_base = OTHER; note = 2'O-methyl-guanosine
  modified_base 1..2: mod_base = OTHER; note = phosphorothioate linkage
  modified_base 2..3: mod_base = OTHER; note = phosphorothioate linkage
  modified_base 21..22: mod_base = OTHER; note = phosphorothioate linkage
  modified_base 22..23: mod_base = OTHER; note = phosphorothioate linkage
  source 1..23: mol_type = other RNA
ttcagccggaagttgtggttgtg

SEQ ID NO: 517 - RNA, 23 nt, synthetic construct
  misc_feature 1..23: note = siRNA sequence name:ETXS542
  modified_base 1: mod_base = OTHER; note = 2'O-methyl-uridine
  modified_base 2: mod_base = OTHER; note = 2' Fluoro-guanosine
  modified_base 3: mod_base = OTHER; note = 2'O-methyl-uridine
  modified_base 4: mod_base = OTHER; note = 2' Fluoro-uridine
  modified_base 5: mod_base = OTHER; note = 2'O-methyl-uridine
  modified_base 6: mod_base = OTHER; note = 2' Fluoro-guanosine
  modified_base 7: mod_base = OTHER; note = 2'O-methyl-uridine
  modified_base 8: mod_base = OTHER; note = 2' Fluoro-cytidine
  modified_base 9: mod_base = OTHER; note = 2'Fluoro-adenosine
  modified_base 10: mod_base = OTHER; note = 2'O-methyl-uridine
  modified_base 11: mod_base = OTHER; note = 2'O-methyl-guanosine
  modified_base 12: mod_base = OTHER; note = 2'O-methyl-cytidine
  modified_base 13: mod_base = OTHER; note = 2'O-methyl-uridine
  modified_base 14: mod_base = OTHER; note = 2' Fluoro-uridine
  modified_base 15: mod_base = OTHER; note = 2'O-methyl-uridine
  modified_base 16: mod_base = OTHER; note = 2' Fluoro-uridine
  modified_base 17: mod_base = OTHER; note = 2'O-methyl-uridine
  modified_base 18: mod_base = OTHER; note = 2'O-methyl-uridine
  modified_base 19: mod_base = OTHER; note = 2'O-methyl-guanosine
  modified_base 20: mod_base = OTHER; note = 2'O-methyl-cytidine
  modified_base 21: mod_base = OTHER; note = 2'O-methyl-cytidine
  modified_base 22: mod_base = OTHER; note = 2'O-methyl-adenosine
  modified_base 23: mod_base = OTHER; note = 2'O-methyl-uridine
  modified_base 1..2: mod_base = OTHER; note = phosphorothioate linkage
  modified_base 2..3: mod_base = OTHER; note = phosphorothioate linkage
  modified_base 21..22: mod_base = OTHER; note = phosphorothioate linkage
  modified_base 22..23: mod_base = OTHER; note = phosphorothioate linkage
  source 1..23: mol_type = other RNA
tgtttgtcatgcttttttgccat

SEQ ID NO: 518 - RNA, 23 nt, synthetic construct
  misc_feature 1..23: note = siRNA sequence name:ETXS544
  modified_base 1: mod_base = OTHER; note = 2'O-methyl-adenosine
  modified_base 2: mod_base = OTHER; note = 2' Fluoro-uridine
  modified_base 3: mod_base = OTHER; note = 2'O-methyl-uridine
  modified_base 4: mod_base = OTHER; note = 2' Fluoro-uridine
  modified_base 5: mod_base = OTHER; note = 2'O-methyl-cytidine
  modified_base 6: mod_base = OTHER; note = 2' Fluoro-cytidine
  modified_base 7: mod_base = OTHER; note = 2'O-methyl-adenosine
  modified_base 8: mod_base = OTHER; note = 2' Fluoro-cytidine
  modified_base 9: mod_base = OTHER; note = 2' Fluoro-uridine
  modified_base 10: mod_base = OTHER; note = 2'O-methyl-guanosine
  modified_base 11: mod_base = OTHER; note = 2'O-methyl-guanosine
  modified_base 12: mod_base = OTHER; note = 2'O-methyl-guanosine
  modified_base 13: mod_base = OTHER; note = 2'O-methyl-adenosine
  modified_base 14: mod_base = OTHER; note = 2'Fluoro-adenosine
  modified_base 15: mod_base = OTHER; note = 2'O-methyl-uridine
  modified_base 16: mod_base = OTHER; note = 2' Fluoro-uridine
  modified_base 17: mod_base = OTHER; note = 2'O-methyl-uridine
  modified_base 18: mod_base = OTHER; note = 2'O-methyl-adenosine
  modified_base 19: mod_base = OTHER; note = 2'O-methyl-uridine
  modified_base 20: mod_base = OTHER; note = 2'O-methyl-uridine
  modified_base 21: mod_base = OTHER; note = 2'O-methyl-cytidine
  modified_base 22: mod_base = OTHER; note = 2'O-methyl-adenosine
  modified_base 23: mod_base = OTHER; note = 2'O-methyl-cytidine
  modified_base 1..2: mod_base = OTHER; note = phosphorothioate linkage
  modified_base 2..3: mod_base = OTHER; note = phosphorothioate linkage
  modified_base 21..22: mod_base = OTHER; note = phosphorothioate linkage
  modified_base 22..23: mod_base = OTHER; note = phosphorothioate linkage
  source 1..23: mol_type = other RNA
atttccactgggaatttattcac

SEQ ID NO: 519 - RNA, 23 nt, synthetic construct
  misc_feature 1..23: note = siRNA sequence name:ETXS546
  modified_base 1: mod_base = OTHER; note = 2'O-methyl-adenosine
  modified_base 2: mod_base = OTHER; note = 2' Fluoro-cytidine
  modified_base 3: mod_base = OTHER; note = 2'O-methyl-adenosine
  modified_base 4: mod_base = OTHER; note = 2'Fluoro-adenosine
  modified_base 5: mod_base = OTHER; note = 2'O-methyl-uridine
  modified_base 6: mod_base = OTHER; note = 2' Fluoro-uridine
  modified_base 7: mod_base = OTHER; note = 2'O-methyl-adenosine
  modified_base 8: mod_base = OTHER; note = 2' Fluoro-guanosine
  modified_base 9: mod_base = OTHER; note = 2' Fluoro-cytidine
  modified_base 10: mod_base = OTHER; note = 2'O-methyl-adenosine
  modified_base 11: mod_base = OTHER; note = 2'O-methyl-uridine
  modified_base 12: mod_base = OTHER; note = 2'O-methyl-guanosine
  modified_base 13: mod_base = OTHER; note = 2'O-methyl-cytidine
  modified_base 14: mod_base = OTHER; note = 2' Fluoro-uridine
  modified_base 15: mod_base = OTHER; note = 2'O-methyl-guanosine
  modified_base 16: mod_base = OTHER; note = 2'Fluoro-adenosine
  modified_base 17: mod_base = OTHER; note = 2'O-methyl-uridine
  modified_base 18: mod_base = OTHER; note = 2'O-methyl-guanosine
  modified_base 19: mod_base = OTHER; note = 2'O-methyl-cytidine
  modified_base 20: mod_base = OTHER; note = 2'O-methyl-cytidine
  modified_base 21: mod_base = OTHER; note = 2'O-methyl-cytidine
  modified_base 22: mod_base = OTHER; note = 2'O-methyl-cytidine
  modified_base 23: mod_base = OTHER; note = 2'O-methyl-cytidine
  modified_base 1..2: mod_base = OTHER; note = phosphorothioate linkage
  modified_base 2..3: mod_base = OTHER; note = phosphorothioate linkage
  modified_base 21..22: mod_base = OTHER; note = phosphorothioate linkage
  modified_base 22..23: mod_base = OTHER; note = phosphorothioate linkage
  source 1..23: mol_type = other RNA
acaattagcatgctgatgccccc

SEQ ID NO: 520 - RNA, 23 nt, synthetic construct
  misc_feature 1..23: note = siRNA sequence name:ETXS548
  modified_base 1: mod_base = OTHER; note = 2'O-methyl-guanosine
  modified_base 2: mod_base = OTHER; note = 2' Fluoro-uridine
  modified_base 3: mod_base = OTHER; note = 2'O-methyl-uridine
  modified_base 4: mod_base = OTHER; note = 2' Fluoro-cytidine
  modified_base 5: mod_base = OTHER; note = 2'O-methyl-uridine
  modified_base 6: mod_base = OTHER; note = 2' Fluoro-guanosine
  modified_base 7: mod_base = OTHER; note = 2'O-methyl-uridine
  modified_base 8: mod_base = OTHER; note = 2' Fluoro-uridine
  modified_base 9: mod_base = OTHER; note = 2' Fluoro-uridine
  modified_base 10: mod_base = OTHER; note = 2'O-methyl-guanosine
  modified_base 11: mod_base = OTHER; note = 2'O-methyl-uridine
  modified_base 12: mod_base = OTHER; note = 2'O-methyl-cytidine
  modified_base 13: mod_base = OTHER; note = 2'O-methyl-adenosine
  modified_base 14: mod_base = OTHER; note = 2' Fluoro-uridine
  modified_base 15: mod_base = OTHER; note = 2'O-methyl-guanosine
  modified_base 16: mod_base = OTHER; note = 2' Fluoro-cytidine
  modified_base 17: mod_base = OTHER; note = 2'O-methyl-uridine
  modified_base 18: mod_base = OTHER; note = 2'O-methyl-uridine
  modified_base 19: mod_base = OTHER; note = 2'O-methyl-uridine
  modified_base 20: mod_base = OTHER; note = 2'O-methyl-uridine
  modified_base 21: mod_base = OTHER; note = 2'O-methyl-uridine
  modified_base 22: mod_base = OTHER; note = 2'O-methyl-uridine
  modified_base 23: mod_base = OTHER; note = 2'O-methyl-guanosine
  modified_base 1..2: mod_base = OTHER; note = phosphorothioate linkage
  modified_base 2..3: mod_base = OTHER; note = phosphorothioate linkage
  modified_base 21..22: mod_base = OTHER; note = phosphorothioate linkage
  modified_base 22..23: mod_base = OTHER; note = phosphorothioate linkage
  source 1..23: mol_type = other RNA
gttctgtttgtcatgcttttttg

SEQ ID NO: 521 - RNA, 23 nt, synthetic construct
  misc_feature 1..23: note = siRNA sequence name:ETXS550
  modified_base 1: mod_base = OTHER; note = 2'O-methyl-guanosine
  modified_base 2: mod_base = OTHER; note = 2' Fluoro-guanosine
  modified_base 3: mod_base = OTHER; note = 2'O-methyl-cytidine
  modified_base 4: mod_base = OTHER; note = 2' Fluoro-cytidine
  modified_base 5: mod_base = OTHER; note = 2'O-methyl-uridine
  modified_base 6: mod_base = OTHER; note = 2' Fluoro-cytidine
  modified_base 7: mod_base = OTHER; note = 2'O-methyl-adenosine
  modified_base 8: mod_base = OTHER; note = 2' Fluoro-guanosine
  modified_base 9: mod_base = OTHER; note = 2' Fluoro-cytidine
  modified_base 10: mod_base = OTHER; note = 2'O-methyl-adenosine
  modified_base 11: mod_base = OTHER; note = 2'O-methyl-adenosine
  modified_base 12: mod_base = OTHER; note = 2'O-methyl-adenosine
  modified_base 13: mod_base = OTHER; note = 2'O-methyl-guanosine
  modified_base 14: mod_base = OTHER; note = 2' Fluoro-uridine
  modified_base 15: mod_base = OTHER; note = 2'O-methyl-adenosine
  modified_base 16: mod_base = OTHER; note = 2'Fluoro-adenosine
  modified_base 17: mod_base = OTHER; note = 2'O-methyl-uridine
  modified_base 18: mod_base = OTHER; note = 2'O-methyl-adenosine
  modified_base 19: mod_base = OTHER; note = 2'O-methyl-cytidine
  modified_base 20: mod_base = OTHER; note = 2'O-methyl-uridine
  modified_base 21: mod_base = OTHER; note = 2'O-methyl-cytidine
  modified_base 22: mod_base = OTHER; note = 2'O-methyl-uridine
  modified_base 23: mod_base = OTHER; note = 2'O-methyl-cytidine
  modified_base 1..2: mod_base = OTHER; note = phosphorothioate linkage
  modified_base 2..3: mod_base = OTHER; note = phosphorothioate linkage
  modified_base 21..22: mod_base = OTHER; note = phosphorothioate linkage
  modified_base 22..23: mod_base = OTHER; note = phosphorothioate linkage
  source 1..23: mol_type = other RNA
ggcctcagcaaagtaatactctc

SEQ ID NO: 522 - RNA, 23 nt, synthetic construct
  misc_feature 1..23: note = siRNA sequence name:ETXS552
  modified_base 1: mod_base = OTHER; note = 2'O-methyl-uridine
  modified_base 2: mod_base = OTHER; note = 2' Fluoro-uridine
  modified_base 3: mod_base = OTHER; note = 2'O-methyl-uridine
  modified_base 4: mod_base = OTHER; note = 2' Fluoro-cytidine
  modified_base 5: mod_base = OTHER; note = 2'O-methyl-cytidine
  modified_base 6: mod_base = OTHER; note = 2'Fluoro-adenosine
  modified_base 7: mod_base = OTHER; note = 2'O-methyl-cytidine
  modified_base 8: mod_base = OTHER; note = 2' Fluoro-uridine
  modified_base 9: mod_base = OTHER; note = 2' Fluoro-guanosine
  modified_base 10: mod_base = OTHER; note = 2'O-methyl-guanosine
  modified_base 11: mod_base = OTHER; note = 2'O-methyl-guanosine
  modified_base 12: mod_base = OTHER; note = 2'O-methyl-adenosine
  modified_base 13: mod_base = OTHER; note = 2'O-methyl-adenosine
  modified_base 14: mod_base = OTHER; note = 2' Fluoro-uridine
  modified_base 15: mod_base = OTHER; note = 2'O-methyl-uridine
  modified_base 16: mod_base = OTHER; note = 2' Fluoro-uridine
  modified_base 17: mod_base = OTHER; note = 2'O-methyl-adenosine
  modified_base 18: mod_base = OTHER; note = 2'O-methyl-uridine
  modified_base 19: mod_base = OTHER; note = 2'O-methyl-uridine
  modified_base 20: mod_base = OTHER; note = 2'O-methyl-cytidine
  modified_base 21: mod_base = OTHER; note = 2'O-methyl-adenosine
  modified_base 22: mod_base = OTHER; note = 2'O-methyl-cytidine
  modified_base 23: mod_base = OTHER; note = 2'O-methyl-cytidine
  modified_base 1..2: mod_base = OTHER; note = phosphorothioate linkage
  modified_base 2..3: mod_base = OTHER; note = phosphorothioate linkage
  modified_base 21..22: mod_base = OTHER; note = phosphorothioate linkage
  modified_base 22..23: mod_base = OTHER; note = phosphorothioate linkage
  source 1..23: mol_type = other RNA
tttccactgggaatttattcacc

SEQ ID NO: 523 - RNA, 23 nt, synthetic construct
  misc_feature 1..23: note = siRNA sequence name:ETXS554
  modified_base 1: mod_base = OTHER; note = 2'O-methyl-guanosine
  modified_base 2: mod_base = OTHER; note = 2'Fluoro-adenosine
  modified_base 3: mod_base = OTHER; note = 2'O-methyl-uridine
  modified_base 4: mod_base = OTHER; note = 2' Fluoro-cytidine
  modified_base 5: mod_base = OTHER; note = 2'O-methyl-cytidine
  modified_base 6: mod_base = OTHER; note = 2' Fluoro-uridine
  modified_base 7: mod_base = OTHER; note = 2'O-methyl-uridine
  modified_base 8: mod_base = OTHER; note = 2' Fluoro-uridine
  modified_base 9: mod_base = OTHER; note = 2' Fluoro-guanosine
  modified_base 10: mod_base = OTHER; note = 2'O-methyl-adenosine
  modified_base 11: mod_base = OTHER; note = 2'O-methyl-adenosine
  modified_base 12: mod_base = OTHER; note = 2'O-methyl-guanosine
  modified_base 13: mod_base = OTHER; note = 2'O-methyl-uridine
  modified_base 14: mod_base = OTHER; note = 2'Fluoro-adenosine
  modified_base 15: mod_base = OTHER; note = 2'O-methyl-guanosine
  modified_base 16: mod_base = OTHER; note = 2'Fluoro-adenosine
  modified_base 17: mod_base = OTHER; note = 2'O-methyl-uridine
  modified_base 18: mod_base = OTHER; note = 2'O-methyl-guanosine
  modified_base 19: mod_base = OTHER; note = 2'O-methyl-cytidine
  modified_base 20: mod_base = OTHER; note = 2'O-methyl-adenosine
  modified_base 21: mod_base = OTHER; note = 2'O-methyl-guanosine
  modified_base 22: mod_base = OTHER; note = 2'O-methyl-uridine
  modified_base 23: mod_base = OTHER; note = 2'O-methyl-uridine
  modified_base 1..2: mod_base = OTHER; note = phosphorothioate linkage
  modified_base 2..3: mod_base = OTHER; note = phosphorothioate linkage
  modified_base 21..22: mod_base = OTHER; note = phosphorothioate linkage
  modified_base 22..23: mod_base = OTHER; note = phosphorothioate linkage
  source 1..23: mol_type = other RNA
gatcctttgaagtagatgcagtt

SEQ ID NO: 524 - RNA, 23 nt, synthetic construct
  misc_feature 1..23: note = siRNA sequence name:ETXS556
  modified_base 1: mod_base = OTHER; note = 2'O-methyl-adenosine
  modified_base 2: mod_base = OTHER; note = 2' Fluoro-uridine
  modified_base 3: mod_base = OTHER; note = 2'O-methyl-cytidine
  modified_base 4: mod_base = OTHER; note = 2' Fluoro-cytidine
  modified_base 5: mod_base = OTHER; note = 2'O-methyl-uridine
  modified_base 6: mod_base = OTHER; note = 2' Fluoro-uridine
  modified_base 7: mod_base = OTHER; note = 2'O-methyl-uridine
  modified_base 8: mod_base = OTHER; note = 2' Fluoro-guanosine
  modified_base 9: mod_base = OTHER; note = 2'Fluoro-adenosine
  modified_base 10: mod_base = OTHER; note = 2'O-methyl-adenosine
  modified_base 11: mod_base = OTHER; note = 2'O-methyl-guanosine
  modified_base 12: mod_base = OTHER; note = 2'O-methyl-uridine
  modified_base 13: mod_base = OTHER; note = 2'O-methyl-adenosine
  modified_base 14: mod_base = OTHER; note = 2' Fluoro-guanosine
  modified_base 15: mod_base = OTHER; note = 2'O-methyl-adenosine
  modified_base 16: mod_base = OTHER; note = 2' Fluoro-uridine
  modified_base 17: mod_base = OTHER; note = 2'O-methyl-guanosine
  modified_base 18: mod_base = OTHER; note = 2'O-methyl-cytidine
  modified_base 19: mod_base = OTHER; note = 2'O-methyl-adenosine
  modified_base 20: mod_base = OTHER; note = 2'O-methyl-guanosine
  modified_base 21: mod_base = OTHER; note = 2'O-methyl-uridine
  modified_base 22: mod_base = OTHER; note = 2'O-methyl-uridine
  modified_base 23: mod_base = OTHER; note = 2'O-methyl-guanosine
  modified_base 1..2: mod_base = OTHER; note = phosphorothioate linkage
  modified_base 2..3: mod_base = OTHER; note = phosphorothioate linkage
  modified_base 21..22: mod_base = OTHER; note = phosphorothioate linkage
  modified_base 22..23: mod_base = OTHER; note = phosphorothioate linkage
  source 1..23: mol_type = other RNA
atcctttgaagtagatgcagttg

SEQ ID NO: 525 - RNA, 23 nt, synthetic construct
  misc_feature 1..23: note = siRNA sequence name:ETXS558
  modified_base 1: mod_base = OTHER; note = 2'O-methyl-adenosine
  modified_base 2: mod_base = OTHER; note = 2' Fluoro-cytidine
  modified_base 3: mod_base = OTHER; note = 2'O-methyl-uridine
  modified_base 4: mod_base = OTHER; note = 2' Fluoro-uridine
  modified_base 5: mod_base = OTHER; note = 2'O-methyl-guanosine
  modified_base 6: mod_base = OTHER; note = 2' Fluoro-uridine
  modified_base 7: mod_base = OTHER; note = 2'O-methyl-uridine
  modified_base 8: mod_base = OTHER; note = 2' Fluoro-cytidine
  modified_base 9: mod_base = OTHER; note = 2'Fluoro-adenosine
  modified_base 10: mod_base = OTHER; note = 2'O-methyl-uridine
  modified_base 11: mod_base = OTHER; note = 2'O-methyl-guanosine
  modified_base 12: mod_base = OTHER; note = 2'O-methyl-guanosine
  modified_base 13: mod_base = OTHER; note = 2'O-methyl-guanosine
  modified_base 14: mod_base = OTHER; note = 2' Fluoro-uridine
  modified_base 15: mod_base = OTHER; note = 2'O-methyl-cytidine
  modified_base 16: mod_base = OTHER; note = 2' Fluoro-uridine
  modified_base 17: mod_base = OTHER; note = 2'O-methyl-cytidine
  modified_base 18: mod_base = OTHER; note = 2'O-methyl-uridine
  modified_base 19: mod_base = OTHER; note = 2'O-methyl-cytidine
  modified_base 20: mod_base = OTHER; note = 2'O-methyl-cytidine
  modified_base 21: mod_base = OTHER; note = 2'O-methyl-cytidine
  modified_base 22: mod_base = OTHER; note = 2'O-methyl-uridine
  modified_base 23: mod_base = OTHER; note = 2'O-methyl-uridine
  modified_base 1..2: mod_base = OTHER; note = phosphorothioate linkage
  modified_base 2..3: mod_base = OTHER; note = phosphorothioate linkage
  modified_base 21..22: mod_base = OTHER; note = phosphorothioate linkage
  modified_base 22..23: mod_base = OTHER; note = phosphorothioate linkage
  source 1..23: mol_type = other RNA
acttgttcatgggtctctccctt

SEQ ID NO: 526 - RNA, 23 nt, synthetic construct
  misc_feature 1..23: note = siRNA sequence name:ETXS560
  modified_base 1: mod_base = OTHER; note = 2'O-methyl-uridine
  modified_base 2: mod_base = OTHER; note = 2' Fluoro-cytidine
  modified_base 3: mod_base = OTHER; note = 2'O-methyl-cytidine
  modified_base 4: mod_base = OTHER; note = 2'Fluoro-adenosine
  modified_base 5: mod_base = OTHER; note = 2'O-methyl-cytidine
  modified_base 6: mod_base = OTHER; note = 2' Fluoro-uridine
  modified_base 7: mod_base = OTHER; note = 2'O-methyl-guanosine
  modified_base 8: mod_base = OTHER; note = 2' Fluoro-guanosine
  modified_base 9: mod_base = OTHER; note = 2' Fluoro-guanosine
  modified_base 10: mod_base = OTHER; note = 2'O-methyl-adenosine
  modified_base 11: mod_base = OTHER; note = 2'O-methyl-adenosine
  modified_base 12: mod_base = OTHER; note = 2'O-methyl-uridine
  modified_base 13: mod_base = OTHER; note = 2'O-methyl-uridine
  modified_base 14: mod_base = OTHER; note = 2' Fluoro-uridine
  modified_base 15: mod_base = OTHER; note = 2'O-methyl-adenosine
  modified_base 16: mod_base = OTHER; note = 2' Fluoro-uridine
  modified_base 17: mod_base = OTHER; note = 2'O-methyl-uridine
  modified_base 18: mod_base = OTHER; note = 2'O-methyl-cytidine
  modified_base 19: mod_base = OTHER; note = 2'O-methyl-adenosine
  modified_base 20: mod_base = OTHER; note = 2'O-methyl-cytidine
  modified_base 21: mod_base = OTHER; note = 2'O-methyl-cytidine
  modified_base 22: mod_base = OTHER; note = 2'O-methyl-cytidine
  modified_base 23: mod_base = OTHER; note = 2'O-methyl-adenosine
  modified_base 1..2: mod_base = OTHER; note = phosphorothioate linkage
  modified_base 2..3: mod_base = OTHER; note = phosphorothioate linkage
  modified_base 21..22: mod_base = OTHER; note = phosphorothioate linkage
  modified_base 22..23: mod_base = OTHER; note = phosphorothioate linkage
  source 1..23: mol_type = other RNA
tccactgggaatttattcaccca

SEQ ID NO: 527 - RNA, 23 nt, synthetic construct
  misc_feature 1..23: note = siRNA sequence name:ETXS562
  modified_base 1: mod_base = OTHER; note = 2'O-methyl-uridine
  modified_base 2: mod_base = OTHER; note = 2' Fluoro-guanosine
  modified_base 3: mod_base = OTHER; note = 2'O-methyl-uridine
  modified_base 4: mod_base = OTHER; note = 2'Fluoro-adenosine
  modified_base 5: mod_base = OTHER; note = 2'O-methyl-cytidine
  modified_base 6: mod_base = OTHER; note = 2' Fluoro-cytidine
  modified_base 7: mod_base = OTHER; note = 2'O-methyl-cytidine
  modified_base 8: mod_base = OTHER; note = 2'Fluoro-adenosine
  modified_base 9: mod_base = OTHER; note = 2'Fluoro-adenosine
  modified_base 10: mod_base = OTHER; note = 2'O-methyl-adenosine
  modified_base 11: mod_base = OTHER; note = 2'O-methyl-adenosine
  modified_base 12: mod_base = OTHER; note = 2'O-methyl-uridine
  modified_base 13: mod_base = OTHER; note = 2'O-methyl-uridine
  modified_base 14: mod_base = OTHER; note = 2' Fluoro-cytidine
  modified_base 15: mod_base = OTHER; note = 2'O-methyl-cytidine
  modified_base 16: mod_base = OTHER; note = 2' Fluoro-uridine
  modified_base 17: mod_base = OTHER; note = 2'O-methyl-cytidine
  modified_base 18: mod_base = OTHER; note = 2'O-methyl-cytidine
  modified_base 19: mod_base = OTHER; note = 2'O-methyl-uridine
  modified_base 20: mod_base = OTHER; note = 2'O-methyl-guanosine
  modified_base 21: mod_base = OTHER; note = 2'O-methyl-adenosine
  modified_base 22: mod_base = OTHER; note = 2'O-methyl-adenosine
  modified_base 23: mod_base = OTHER; note = 2'O-methyl-guanosine
  modified_base 1..2: mod_base = OTHER; note = phosphorothioate linkage
  modified_base 2..3: mod_base = OTHER; note = phosphorothioate linkage
  modified_base 21..22: mod_base = OTHER; note = phosphorothioate linkage
  modified_base 22..23: mod_base = OTHER; note = phosphorothioate linkage
  source 1..23: mol_type = other RNA
tgtacccaaaattcctcctgaag

SEQ ID NO: 528 - RNA, 23 nt, synthetic construct
  misc_feature 1..23: note = siRNA sequence name:ETXS564
  modified_base 1: mod_base = OTHER; note = 2'O-methyl-uridine
  modified_base 2: mod_base = OTHER; note = 2' Fluoro-uridine
  modified_base 3: mod_base = OTHER; note = 2'O-methyl-cytidine
  modified_base 4: mod_base = OTHER; note = 2' Fluoro-cytidine
  modified_base 5: mod_base = OTHER; note = 2'O-methyl-cytidine
  modified_base 6: mod_base = OTHER; note = 2'Fluoro-adenosine
  modified_base 7: mod_base = OTHER; note = 2'O-methyl-uridine
  modified_base 8: mod_base = OTHER; note = 2' Fluoro-guanosine
  modified_base 9: mod_base = OTHER; note = 2'Fluoro-adenosine
  modified_base 10: mod_base = OTHER; note = 2'O-methyl-adenosine
  modified_base 11: mod_base = OTHER; note = 2'O-methyl-guanosine
  modified_base 12: mod_base = OTHER; note = 2'O-methyl-adenosine
  modified_base 13: mod_base = OTHER; note = 2'O-methyl-guanosine
  modified_base 14: mod_base = OTHER; note = 2' Fluoro-cytidine
  modified_base 15: mod_base = OTHER; note = 2'O-methyl-adenosine
  modified_base 16: mod_base = OTHER; note = 2' Fluoro-guanosine
  modified_base 17: mod_base = OTHER; note = 2'O-methyl-guanosine
  modified_base 18: mod_base = OTHER; note = 2'O-methyl-cytidine
  modified_base 19: mod_base = OTHER; note = 2'O-methyl-adenosine
  modified_base 20: mod_base = OTHER; note = 2'O-methyl-guanosine
  modified_base 21: mod_base = OTHER; note = 2'O-methyl-cytidine
  modified_base 22: mod_base = OTHER; note = 2'O-methyl-uridine
  modified_base 23: mod_base = OTHER; note = 2'O-methyl-guanosine
  modified_base 1..2: mod_base = OTHER; note = phosphorothioate linkage
  modified_base 2..3: mod_base = OTHER; note = phosphorothioate linkage
  modified_base 21..22: mod_base = OTHER; note = phosphorothioate linkage
  modified_base 22..23: mod_base = OTHER; note = phosphorothioate linkage
  source 1..23: mol_type = other RNA
ttcccatgaagagcaggcagctg

SEQ ID NO: 529 - RNA, 23 nt, synthetic construct
  misc_feature 1..23: note = siRNA sequence name:ETXS566
  modified_base 1: mod_base = OTHER; note = 2'O-methyl-uridine
  modified_base 2: mod_base = OTHER; note = 2' Fluoro-cytidine
  modified_base 3: mod_base = OTHER; note = 2'O-methyl-uridine
  modified_base 4: mod_base = OTHER; note = 2' Fluoro-uridine
  modified_base 5: mod_base = OTHER; note = 2'O-methyl-uridine
  modified_base 6: mod_base = OTHER; note = 2' Fluoro-uridine
  modified_base 7: mod_base = OTHER; note = 2'O-methyl-adenosine
  modified_base 8: mod_base = OTHER; note = 2' Fluoro-uridine
  modified_base 9: mod_base = OTHER; note = 2' Fluoro-guanosine
  modified_base 10: mod_base = OTHER; note = 2'O-methyl-adenosine
  modified_base 11: mod_base = OTHER; note = 2'O-methyl-guanosine
  modified_base 12: mod_base = OTHER; note = 2'O-methyl-guanosine
  modified_base 13: mod_base = OTHER; note = 2'O-methyl-cytidine
  modified_base 14: mod_base = OTHER; note = 2' Fluoro-cytidine
  modified_base 15: mod_base = OTHER; note = 2'O-methyl-cytidine
  modified_base 16: mod_base = OTHER; note = 2' Fluoro-uridine
  modified_base 17: mod_base = OTHER; note = 2'O-methyl-uridine
  modified_base 18: mod_base = OTHER; note = 2'O-methyl-guanosine
  modified_base 19: mod_base = OTHER; note = 2'O-methyl-guanosine
  modified_base 20: mod_base = OTHER; note = 2'O-methyl-uridine
  modified_base 21: mod_base = OTHER; note = 2'O-methyl-guanosine
  modified_base 22: mod_base = OTHER; note = 2'O-methyl-adenosine
  modified_base 23: mod_base = OTHER; note = 2'O-methyl-guanosine
  modified_base 1..2: mod_base = OTHER; note = phosphorothioate linkage
  modified_base 2..3: mod_base = OTHER; note = phosphorothioate linkage
  modified_base 21..22: mod_base = OTHER; note = phosphorothioate linkage
  modified_base 22..23: mod_base = OTHER; note = phosphorothioate linkage
  source 1..23: mol_type = other RNA
tcttttatgaggcccttggtgag

SEQ ID NO: 530 - RNA, 23 nt, synthetic construct
  misc_feature 1..23: note = siRNA sequence name:ETXS568
  modified_base 1: mod_base = OTHER; note = 2'O-methyl-adenosine
  modified_base 2: mod_base = OTHER; note = 2'Fluoro-adenosine
  modified_base 3: mod_base = OTHER; note = 2'O-methyl-cytidine
  modified_base 4: mod_base = OTHER; note = 2' Fluoro-uridine
  modified_base 5: mod_base = OTHER; note = 2'O-methyl-guanosine
  modified_base 6: mod_base = OTHER; note = 2' Fluoro-cytidine
  modified_base 7: mod_base = OTHER; note = 2'O-methyl-uridine
  modified_base 8: mod_base = OTHER; note = 2' Fluoro-uridine
  modified_base 9: mod_base = OTHER; note = 2' Fluoro-cytidine
  modified_base 10: mod_base = OTHER; note = 2'O-methyl-uridine
  modified_base 11: mod_base = OTHER; note = 2'O-methyl-guanosine
  modified_base 12: mod_base = OTHER; note = 2'O-methyl-guanosine
  modified_base 13: mod_base = OTHER; note = 2'O-methyl-adenosine
  modified_base 14: mod_base = OTHER; note = 2' Fluoro-uridine
  modified_base 15: mod_base = OTHER; note = 2'O-methyl-adenosine
  modified_base 16: mod_base = OTHER; note = 2' Fluoro-uridine
  modified_base 17: mod_base = OTHER; note = 2'O-methyl-adenosine
  modified_base 18: mod_base = OTHER; note = 2'O-methyl-adenosine
  modified_base 19: mod_base = OTHER; note = 2'O-methyl-adenosine
  modified_base 20: mod_base = OTHER; note = 2'O-methyl-guanosine
  modified_base 21: mod_base = OTHER; note = 2'O-methyl-guanosine
  modified_base 22: mod_base = OTHER; note = 2'O-methyl-uridine
  modified_base 23: mod_base = OTHER; note = 2'O-methyl-cytidine
  modified_base 1..2: mod_base = OTHER; note = phosphorothioate linkage
  modified_base 2..3: mod_base = OTHER; note = phosphorothioate linkage
  modified_base 21..22: mod_base = OTHER; note = phosphorothioate linkage
  modified_base 22..23: mod_base = OTHER; note = phosphorothioate linkage
  source 1..23: mol_type = other RNA
aactgcttctggatataaaggtc

SEQ ID NO: 531 - RNA, 23 nt, synthetic construct
  misc_feature 1..23: note = siRNA sequence name:ETXS570
  modified_base 1: mod_base = OTHER; note = 2'O-methyl-cytidine
  modified_base 2: mod_base = OTHER; note = 2' Fluoro-cytidine
  modified_base 3: mod_base = OTHER; note = 2'O-methyl-uridine
  modified_base 4: mod_base = OTHER; note = 2' Fluoro-uridine
  modified_base 5: mod_base = OTHER; note = 2'O-methyl-uridine
  modified_base 6: mod_base = OTHER; note = 2' Fluoro-guanosine
  modified_base 7: mod_base = OTHER; note = 2'O-methyl-adenosine
  modified_base 8: mod_base = OTHER; note = 2'Fluoro-adenosine
  modified_base 9: mod_base = OTHER; note = 2' Fluoro-guanosine
  modified_base 10: mod_base = OTHER; note = 2'O-methyl-uridine
  modified_base 11: mod_base = OTHER; note = 2'O-methyl-adenosine
  modified_base 12: mod_base = OTHER; note = 2'O-methyl-guanosine
  modified_base 13: mod_base = OTHER; note = 2'O-methyl-adenosine
  modified_base 14: mod_base = OTHER; note = 2' Fluoro-uridine
  modified_base 15: mod_base = OTHER; note = 2'O-methyl-guanosine
  modified_base 16: mod_base = OTHER; note = 2' Fluoro-cytidine
  modified_base 17: mod_base = OTHER; note = 2'O-methyl-adenosine
  modified_base 18: mod_base = OTHER; note = 2'O-methyl-guanosine
  modified_base 19: mod_base = OTHER; note = 2'O-methyl-uridine
  modified_base 20: mod_base = OTHER; note = 2'O-methyl-uridine
  modified_base 21: mod_base = OTHER; note = 2'O-methyl-guanosine
  modified_base 22: mod_base = OTHER; note = 2'O-methyl-adenosine
  modified_base 23: mod_base = OTHER; note = 2'O-methyl-guanosine
  modified_base 1..2: mod_base = OTHER; note = phosphorothioate linkage
  modified_base 2..3: mod_base = OTHER; note = phosphorothioate linkage
  modified_base 21..22: mod_base = OTHER; note = phosphorothioate linkage
  modified_base 22..23: mod_base = OTHER; note = phosphorothioate linkage
  source 1..23: mol_type = other RNA
cctttgaagtagatgcagttgag

SEQ ID NO: 532 - RNA, 23 nt, synthetic construct
  misc_feature 1..23: note = siRNA sequence name:ETXS572
  modified_base 1: mod_base = OTHER; note = 2'O-methyl-uridine
  modified_base 2: mod_base = OTHER; note = 2' Fluoro-uridine
  modified_base 3: mod_base = OTHER; note = 2'O-methyl-adenosine
  modified_base 4: mod_base = OTHER; note = 2'Fluoro-adenosine
  modified_base 5: mod_base = OTHER; note = 2'O-methyl-guanosine
  modified_base 6: mod_base = OTHER; note = 2'Fluoro-adenosine
  modified_base 7: mod_base = OTHER; note = 2'O-methyl-cytidine
  modified_base 8: mod_base = OTHER; note = 2' Fluoro-guanosine
  modified_base 9: mod_base = OTHER; note = 2' Fluoro-cytidine
  modified_base 10: mod_base = OTHER; note = 2'O-methyl-uridine
  modified_base 11: mod_base = OTHER; note = 2'O-methyl-guanosine
  modified_base 12: mod_base = OTHER; note = 2'O-methyl-guanosine
  modified_base 13: mod_base = OTHER; note = 2'O-methyl-adenosine
  modified_base 14: mod_base = OTHER; note = 2' Fluoro-uridine
  modified_base 15: mod_base = OTHER; note = 2'O-methyl-cytidine
  modified_base 16: mod_base = OTHER; note = 2' Fluoro-cytidine
  modified_base 17: mod_base = OTHER; note = 2'O-methyl-guanosine
  modified_base 18: mod_base = OTHER; note = 2'O-methyl-guanosine
  modified_base 19: mod_base = OTHER; note = 2'O-methyl-cytidine
  modified_base 20: mod_base = OTHER; note = 2'O-methyl-uridine
  modified_base 21: mod_base = OTHER; note = 2'O-methyl-cytidine
  modified_base 22: mod_base = OTHER; note = 2'O-methyl-uridine
  modified_base 23: mod_base = OTHER; note = 2'O-methyl-uridine
  modified_base 1..2: mod_base = OTHER; note = phosphorothioate linkage
  modified_base 2..3: mod_base = OTHER; note = phosphorothioate linkage
  modified_base 21..22: mod_base = OTHER; note = phosphorothioate linkage
  modified_base 22..23: mod_base = OTHER; note = phosphorothioate linkage
  source 1..23: mol_type = other RNA
ttaagacgctggatccggctctt

SEQ ID NO: 533 - RNA, 23 nt, synthetic construct
  misc_feature 1..23: note = siRNA sequence name:ETXS574
  modified_base 1: mod_base = OTHER; note = 2'O-methyl-guanosine
  modified_base 2: mod_base = OTHER; note = 2'Fluoro-adenosine
  modified_base 3: mod_base = OTHER; note = 2'O-methyl-guanosine
  modified_base 4: mod_base = OTHER; note = 2' Fluoro-guanosine
  modified_base 5: mod_base = OTHER; note = 2'O-methyl-adenosine
  modified_base 6: mod_base = OTHER; note = 2' Fluoro-uridine
  modified_base 7: mod_base = OTHER; note = 2'O-methyl-guanosine
  modified_base 8: mod_base = OTHER; note = 2' Fluoro-uridine
  modified_base 9: mod_base = OTHER; note = 2' Fluoro-uridine
  modified_base 10: mod_base = OTHER; note = 2'O-methyl-adenosine
  modified_base 11: mod_base = OTHER; note = 2'O-methyl-adenosine
  modified_base 12: mod_base = OTHER; note = 2'O-methyl-guanosine
  modified_base 13: mod_base = OTHER; note = 2'O-methyl-adenosine
  modified_base 14: mod_base = OTHER; note = 2' Fluoro-cytidine
  modified_base 15: mod_base = OTHER; note = 2'O-methyl-guanosine
  modified_base 16: mod_base = OTHER; note = 2' Fluoro-cytidine
  modified_base 17: mod_base = OTHER; note = 2'O-methyl-uridine
  modified_base 18: mod_base = OTHER; note = 2'O-methyl-guanosine
  modified_base 19: mod_base = OTHER; note = 2'O-methyl-guanosine
  modified_base 20: mod_base = OTHER; note = 2'O-methyl-adenosine
  modified_base 21: mod_base = OTHER; note = 2'O-methyl-uridine
  modified_base 22: mod_base = OTHER; note = 2'O-methyl-cytidine
  modified_base 23: mod_base = OTHER; note = 2'O-methyl-cytidine
  modified_base 1..2: mod_base = OTHER; note = phosphorothioate linkage
  modified_base 2..3: mod_base = OTHER; note = phosphorothioate linkage
  modified_base 21..22: mod_base = OTHER; note = phosphorothioate linkage
  modified_base 22..23: mod_base = OTHER; note = phosphorothioate linkage
  source 1..23: mol_type = other RNA
gaggatgttaagacgctggatcc

SEQ ID NO: 534 - RNA, 23 nt, synthetic construct
  misc_feature 1..23: note = siRNA sequence name:ETXS576
  modified_base 1: mod_base = OTHER; note = 2'O-methyl-uridine
  modified_base 2: mod_base = OTHER; note = 2' Fluoro-cytidine
  modified_base 3: mod_base = OTHER; note = 2'O-methyl-uridine
  modified_base 4: mod_base = OTHER; note = 2' Fluoro-guanosine
  modified_base 5: mod_base = OTHER; note = 2'O-methyl-uridine
  modified_base 6: mod_base = OTHER; note = 2' Fluoro-uridine
  modified_base 7: mod_base = OTHER; note = 2'O-methyl-uridine
  modified_base 8: mod_base = OTHER; note = 2' Fluoro-guanosine
  modified_base 9: mod_base = OTHER; note = 2' Fluoro-uridine
  modified_base 10: mod_base = OTHER; note = 2'O-methyl-cytidine
  modified_base 11: mod_base = OTHER; note = 2'O-methyl-adenosine
  modified_base 12: mod_base = OTHER; note = 2'O-methyl-uridine
  modified_base 13: mod_base = OTHER; note = 2'O-methyl-guanosine
  modified_base 14: mod_base = OTHER; note = 2' Fluoro-cytidine
  modified_base 15: mod_base = OTHER; note = 2'O-methyl-uridine
  modified_base 16: mod_base = OTHER; note = 2' Fluoro-uridine
  modified_base 17: mod_base = OTHER; note = 2'O-methyl-uridine
  modified_base 18: mod_base = OTHER; note = 2'O-methyl-uridine
  modified_base 19: mod_base = OTHER; note = 2'O-methyl-uridine
  modified_base 20: mod_base = OTHER; note = 2'O-methyl-uridine
  modified_base 21: mod_base = OTHER; note = 2'O-methyl-guanosine
  modified_base 22: mod_base = OTHER; note = 2'O-methyl-cytidine
  modified_base 23: mod_base = OTHER; note = 2'O-methyl-cytidine
  modified_base 1..2: mod_base = OTHER; note = phosphorothioate linkage
  modified_base 2..3: mod_base = OTHER; note = phosphorothioate linkage
  modified_base 21..22: mod_base = OTHER; note = phosphorothioate linkage
  modified_base 22..23: mod_base = OTHER; note = phosphorothioate linkage
  source 1..23: mol_type = other RNA
tctgtttgtcatgcttttttgcc

SEQ ID NO: 535 - RNA, 23 nt, synthetic construct
  misc_feature 1..23: note = siRNA sequence name:ETXS578
  modified_base 1: mod_base = OTHER; note = 2'O-methyl-guanosine
  modified_base 2: mod_base = OTHER; note = 2' Fluoro-uridine
  modified_base 3: mod_base = OTHER; note = 2'O-methyl-guanosine
  modified_base 4: mod_base = OTHER; note = 2' Fluoro-uridine
  modified_base 5: mod_base = OTHER; note = 2'O-methyl-adenosine
  modified_base 6: mod_base = OTHER; note = 2' Fluoro-cytidine
  modified_base 7: mod_base = OTHER; note = 2'O-methyl-cytidine
  modified_base 8: mod_base = OTHER; note = 2' Fluoro-cytidine
  modified_base 9: mod_base = OTHER; note = 2'Fluoro-adenosine
  modified_base 10: mod_base = OTHER; note = 2'O-methyl-adenosine
  modified_base 11: mod_base = OTHER; note = 2'O-methyl-adenosine
  modified_base 12: mod_base = OTHER; note = 2'O-methyl-adenosine
  modified_base 13: mod_base = OTHER; note = 2'O-methyl-uridine
  modified_base 14: mod_base = OTHER; note = 2' Fluoro-uridine
  modified_base 15: mod_base = OTHER; note = 2'O-methyl-cytidine
  modified_base 16: mod_base = OTHER; note = 2' Fluoro-cytidine
  modified_base 17: mod_base = OTHER; note = 2'O-methyl-uridine
  modified_base 18: mod_base = OTHER; note = 2'O-methyl-cytidine
  modified_base 19: mod_base = OTHER; note = 2'O-methyl-cytidine
  modified_base 20: mod_base = OTHER; note = 2'O-methyl-uridine
  modified_base 21: mod_base = OTHER; note = 2'O-methyl-guanosine
  modified_base 22: mod_base = OTHER; note = 2'O-methyl-adenosine
  modified_base 23: mod_base = OTHER; note = 2'O-methyl-adenosine
  modified_base 1..2: mod_base = OTHER; note = phosphorothioate linkage
  modified_base 2..3: mod_base = OTHER; note = phosphorothioate linkage
  modified_base 21..22: mod_base = OTHER; note = phosphorothioate linkage
  modified_base 22..23: mod_base = OTHER; note = phosphorothioate linkage
  source 1..23: mol_type = other RNA
gtgtacccaaaattcctcctgaa

SEQ ID NO: 536 - RNA, 23 nt, synthetic construct
  misc_feature 1..23: note = siRNA sequence name:ETXS580
  modified_base 1: mod_base = OTHER; note = 2'O-methyl-uridine
  modified_base 2: mod_base = OTHER; note = 2' Fluoro-uridine
  modified_base 3: mod_base = OTHER; note = 2'O-methyl-cytidine
  modified_base 4: mod_base = OTHER; note = 2'Fluoro-adenosine
  modified_base 5: mod_base = OTHER; note = 2'O-methyl-guanosine
  modified_base 6: mod_base = OTHER; note = 2' Fluoro-cytidine
  modified_base 7: mod_base = OTHER; note = 2'O-methyl-cytidine
  modified_base 8: mod_base = OTHER; note = 2' Fluoro-guanosine
  modified_base 9: mod_base = OTHER; note = 2' Fluoro-guanosine
  modified_base 10: mod_base = OTHER; note = 2'O-methyl-adenosine
  modified_base 11: mod_base = OTHER; note = 2'O-methyl-adenosine
  modified_base 12: mod_base = OTHER; note = 2'O-methyl-guanosine
  modified_base 13: mod_base = OTHER; note = 2'O-methyl-uridine
  modified_base 14: mod_base = OTHER; note = 2' Fluoro-uridine
  modified_base 15: mod_base = OTHER; note = 2'O-methyl-guanosine
  modified_base 16: mod_base = OTHER; note = 2' Fluoro-uridine
  modified_base 17: mod_base = OTHER; note = 2'O-methyl-guanosine
  modified_base 18: mod_base = OTHER; note = 2'O-methyl-guanosine
  modified_base 19: mod_base = OTHER; note = 2'O-methyl-uridine
  modified_base 20: mod_base = OTHER; note = 2'O-methyl-uridine
  modified_base 21: mod_base = OTHER; note = 2'O-methyl-guanosine
  modified_base 22: mod_base = OTHER; note = 2'O-methyl-uridine
  modified_base 23: mod_base = OTHER; note = 2'O-methyl-guanosine
  modified_base 1..2: mod_base = OTHER; note = phosphorothioate linkage
  modified_base 2..3: mod_base = OTHER; note = phosphorothioate linkage
  modified_base 21..22: mod_base = OTHER; note = phosphorothioate linkage
  modified_base 22..23: mod_base = OTHER; note = phosphorothioate linkage
  source 1..23: mol_type = other RNA
ttcagccggaagttgtggttgtg

SEQ ID NO: 537 - RNA, 23 nt, synthetic construct
  misc_feature 1..23: note = siRNA sequence name:ETXS582
  modified_base 1: mod_base = OTHER; note = 2'O-methyl-uridine
  modified_base 2: mod_base = OTHER; note = 2' Fluoro-guanosine
  modified_base 3: mod_base = OTHER; note = 2'O-methyl-uridine
  modified_base 4: mod_base = OTHER; note = 2' Fluoro-uridine
  modified_base 5: mod_base = OTHER; note = 2'O-methyl-uridine
  modified_base 6: mod_base = OTHER; note = 2' Fluoro-guanosine
  modified_base 7: mod_base = OTHER; note = 2'O-methyl-uridine
  modified_base 8: mod_base = OTHER; note = 2' Fluoro-cytidine
  modified_base 9: mod_base = OTHER; note = 2'Fluoro-adenosine
  modified_base 10: mod_base = OTHER; note = 2'O-methyl-uridine
  modified_base 11: mod_base = OTHER; note = 2'O-methyl-guanosine
  modified_base 12: mod_base = OTHER; note = 2'O-methyl-cytidine
  modified_base 13: mod_base = OTHER; note = 2'O-methyl-uridine
  modified_base 14: mod_base = OTHER; note = 2' Fluoro-uridine
  modified_base 15: mod_base = OTHER; note = 2'O-methyl-uridine
  modified_base 16: mod_base = OTHER; note = 2' Fluoro-uridine
  modified_base 17: mod_base = OTHER; note = 2'O-methyl-uridine
  modified_base 18: mod_base = OTHER; note = 2'O-methyl-uridine
  modified_base 19: mod_base = OTHER; note = 2'O-methyl-guanosine
  modified_base 20: mod_base = OTHER; note = 2'O-methyl-cytidine
  modified_base 21: mod_base = OTHER; note = 2'O-methyl-cytidine
  modified_base 22: mod_base = OTHER; note = 2'O-methyl-adenosine
  modified_base 23: mod_base = OTHER; note = 2'O-methyl-uridine
  modified_base 1..2: mod_base = OTHER; note = phosphorothioate linkage
  modified_base 2..3: mod_base = OTHER; note = phosphorothioate linkage
  modified_base 21..22: mod_base = OTHER; note = phosphorothioate linkage
  modified_base 22..23: mod_base = OTHER; note = phosphorothioate linkage
  source 1..23: mol_type = other RNA
tgtttgtcatgcttttttgccat

SEQ ID NO: 538 - RNA, 23 nt, synthetic construct
  misc_feature 1..23: note = siRNA sequence name:ETXS584
  modified_base 1: mod_base = OTHER; note = 2'O-methyl-adenosine
  modified_base 2: mod_base = OTHER; note = 2' Fluoro-uridine
  modified_base 3: mod_base = OTHER; note = 2'O-methyl-uridine
  modified_base 4: mod_base = OTHER; note = 2' Fluoro-uridine
  modified_base 5: mod_base = OTHER; note = 2'O-methyl-cytidine
  modified_base 6: mod_base = OTHER; note = 2' Fluoro-cytidine
  modified_base 7: mod_base = OTHER; note = 2'O-methyl-adenosine
  modified_base 8: mod_base = OTHER; note = 2' Fluoro-cytidine
  modified_base 9: mod_base = OTHER; note = 2' Fluoro-uridine
  modified_base 10: mod_base = OTHER; note = 2'O-methyl-guanosine
  modified_base 11: mod_base = OTHER; note = 2'O-methyl-guanosine
  modified_base 12: mod_base = OTHER; note = 2'O-methyl-guanosine
  modified_base 13: mod_base = OTHER; note = 2'O-methyl-adenosine
  modified_base 14: mod_base = OTHER; note = 2'Fluoro-adenosine
  modified_base 15: mod_base = OTHER; note = 2'O-methyl-uridine
  modified_base 16: mod_base = OTHER; note = 2' Fluoro-uridine
  modified_base 17: mod_base = OTHER; note = 2'O-methyl-uridine
  modified_base 18: mod_base = OTHER; note = 2'O-methyl-adenosine
  modified_base 19: mod_base = OTHER; note = 2'O-methyl-uridine
  modified_base 20: mod_base = OTHER; note = 2'O-methyl-uridine
  modified_base 21: mod_base = OTHER; note = 2'O-methyl-cytidine
  modified_base 22: mod_base = OTHER; note = 2'O-methyl-adenosine
  modified_base 23: mod_base = OTHER; note = 2'O-methyl-cytidine
  modified_base 1..2: mod_base = OTHER; note = phosphorothioate linkage
  modified_base 2..3: mod_base = OTHER; note = phosphorothioate linkage
  modified_base 21..22: mod_base = OTHER; note = phosphorothioate linkage
  modified_base 22..23: mod_base = OTHER; note = phosphorothioate linkage
  source 1..23: mol_type = other RNA
atttccactgggaatttattcac

SEQ ID NO: 539 - RNA, 23 nt, synthetic construct
  misc_feature 1..23: note = siRNA sequence name:ETXS586
  modified_base 1: mod_base = OTHER; note = 2'O-methyl-adenosine
  modified_base 2: mod_base = OTHER; note = 2' Fluoro-cytidine
  modified_base 3: mod_base = OTHER; note = 2'O-methyl-adenosine
  modified_base 4: mod_base = OTHER; note = 2'Fluoro-adenosine
  modified_base 5: mod_base = OTHER; note = 2'O-methyl-uridine
  modified_base 6: mod_base = OTHER; note = 2' Fluoro-uridine
  modified_base 7: mod_base = OTHER; note = 2'O-methyl-adenosine
  modified_base 8: mod_base = OTHER; note = 2' Fluoro-guanosine
  modified_base 9: mod_base = OTHER; note = 2' Fluoro-cytidine
  modified_base 10: mod_base = OTHER; note = 2'O-methyl-adenosine
  modified_base 11: mod_base = OTHER; note = 2'O-methyl-uridine
  modified_base 12: mod_base = OTHER; note = 2'O-methyl-guanosine
  modified_base 13: mod_base = OTHER; note = 2'O-methyl-cytidine
  modified_base 14: mod_base = OTHER; note = 2' Fluoro-uridine
  modified_base 15: mod_base = OTHER; note = 2'O-methyl-guanosine
  modified_base 16: mod_base = OTHER; note = 2'Fluoro-adenosine
  modified_base 17: mod_base = OTHER; note = 2'O-methyl-uridine
  modified_base 18: mod_base = OTHER; note = 2'O-methyl-guanosine
  modified_base 19: mod_base = OTHER; note = 2'O-methyl-cytidine
  modified_base 20: mod_base = OTHER; note = 2'O-methyl-cytidine
  modified_base 21: mod_base = OTHER; note = 2'O-methyl-cytidine
  modified_base 22: mod_base = OTHER; note = 2'O-methyl-cytidine
  modified_base 23: mod_base = OTHER; note = 2'O-methyl-cytidine
  modified_base 1..2: mod_base = OTHER; note = phosphorothioate linkage
  modified_base 2..3: mod_base = OTHER; note = phosphorothioate linkage
  modified_base 21..22: mod_base = OTHER; note = phosphorothioate linkage
  modified_base 22..23: mod_base = OTHER; note = phosphorothioate linkage
  source 1..23: mol_type = other RNA
acaattagcatgctgatgccccc

SEQ ID NO: 540 - RNA, 23 nt, synthetic construct
  misc_feature 1..23: note = siRNA sequence name:ETXS588
  modified_base 1: mod_base = OTHER; note = 2'O-methyl-guanosine
  modified_base 2: mod_base = OTHER; note = 2' Fluoro-uridine
  modified_base 3: mod_base = OTHER; note = 2'O-methyl-uridine
  modified_base 4: mod_base = OTHER; note = 2' Fluoro-cytidine
  modified_base 5: mod_base = OTHER; note = 2'O-methyl-uridine
  modified_base 6: mod_base = OTHER; note = 2' Fluoro-guanosine
  modified_base 7: mod_base = OTHER; note = 2'O-methyl-uridine
  modified_base 8: mod_base = OTHER; note = 2' Fluoro-uridine
  modified_base 9: mod_base = OTHER; note = 2' Fluoro-uridine
  modified_base 10: mod_base = OTHER; note = 2'O-methyl-guanosine
  modified_base 11: mod_base = OTHER; note = 2'O-methyl-uridine
  modified_base 12: mod_base = OTHER; note = 2'O-methyl-cytidine
  modified_base 13: mod_base = OTHER; note = 2'O-methyl-adenosine
  modified_base 14: mod_base = OTHER; note = 2' Fluoro-uridine
  modified_base 15: mod_base = OTHER; note = 2'O-methyl-guanosine
  modified_base 16: mod_base = OTHER; note = 2' Fluoro-cytidine
  modified_base 17: mod_base = OTHER; note = 2'O-methyl-uridine
  modified_base 18: mod_base = OTHER; note = 2'O-methyl-uridine
  modified_base 19: mod_base = OTHER; note = 2'O-methyl-uridine
  modified_base 20: mod_base = OTHER; note = 2'O-methyl-uridine
  modified_base 21: mod_base = OTHER; note = 2'O-methyl-uridine
  modified_base 22: mod_base = OTHER; note = 2'O-methyl-uridine
  modified_base 23: mod_base = OTHER; note = 2'O-methyl-guanosine
  modified_base 1..2: mod_base = OTHER; note = phosphorothioate linkage
  modified_base 2..3: mod_base = OTHER; note = phosphorothioate linkage
  modified_base 21..22: mod_base = OTHER; note = phosphorothioate linkage
  modified_base 22..23: mod_base = OTHER; note = phosphorothioate linkage
  source 1..23: mol_type = other RNA
gttctgtttgtcatgcttttttg

SEQ ID NO: 541 - RNA, 23 nt, synthetic construct
  misc_feature 1..23: note = siRNA sequence name:ETXS590
  modified_base 1: mod_base = OTHER; note = 2'O-methyl-guanosine
  modified_base 2: mod_base = OTHER; note = 2' Fluoro-guanosine
  modified_base 3: mod_base = OTHER; note = 2'O-methyl-cytidine
  modified_base 4: mod_base = OTHER; note = 2' Fluoro-cytidine
  modified_base 5: mod_base = OTHER; note = 2'O-methyl-uridine
  modified_base 6: mod_base = OTHER; note = 2' Fluoro-cytidine
  modified_base 7: mod_base = OTHER; note = 2'O-methyl-adenosine
  modified_base 8: mod_base = OTHER; note = 2' Fluoro-guanosine
  modified_base 9: mod_base = OTHER; note = 2' Fluoro-cytidine
  modified_base 10: mod_base = OTHER; note = 2'O-methyl-adenosine
  modified_base 11: mod_base = OTHER; note = 2'O-methyl-adenosine
  modified_base 12: mod_base = OTHER; note = 2'O-methyl-adenosine
  modified_base 13: mod_base = OTHER; note = 2'O-methyl-guanosine
  modified_base 14: mod_base = OTHER; note = 2' Fluoro-uridine
  modified_base 15: mod_base = OTHER; note = 2'O-methyl-adenosine
  modified_base 16: mod_base = OTHER; note = 2'Fluoro-adenosine
  modified_base 17: mod_base = OTHER; note = 2'O-methyl-uridine
  modified_base 18: mod_base = OTHER; note = 2'O-methyl-adenosine
  modified_base 19: mod_base = OTHER; note = 2'O-methyl-cytidine
  modified_base 20: mod_base = OTHER; note = 2'O-methyl-uridine
  modified_base 21: mod_base = OTHER; note = 2'O-methyl-cytidine
  modified_base 22: mod_base = OTHER; note = 2'O-methyl-uridine
  modified_base 23: mod_base = OTHER; note = 2'O-methyl-cytidine
  modified_base 1..2: mod_base = OTHER; note = phosphorothioate linkage
  modified_base 2..3: mod_base = OTHER; note = phosphorothioate linkage
  modified_base 21..22: mod_base = OTHER; note = phosphorothioate linkage
  modified_base 22..23: mod_base = OTHER; note = phosphorothioate linkage
  source 1..23: mol_type = other RNA
ggcctcagcaaagtaatactctc

SEQ ID NO: 542 - RNA, 23 nt, synthetic construct
  misc_feature 1..23: note = siRNA sequence name:ETXS592
  modified_base 1: mod_base = OTHER; note = 2'O-methyl-uridine
  modified_base 2: mod_base = OTHER; note = 2' Fluoro-uridine
  modified_base 3: mod_base = OTHER; note = 2'O-methyl-uridine
  modified_base 4: mod_base = OTHER; note = 2' Fluoro-cytidine
  modified_base 5: mod_base = OTHER; note = 2'O-methyl-cytidine
  modified_base 6: mod_base = OTHER; note = 2'Fluoro-adenosine
  modified_base 7: mod_base = OTHER; note = 2'O-methyl-cytidine
  modified_base 8: mod_base = OTHER; note = 2'O-methyl-uridine
  modified_base 9: mod_base = OTHER; note = 2'O-methyl-guanosine
  modified_base 10: mod_base = OTHER; note = 2'O-methyl-guanosine
  modified_base 11: mod_base = OTHER; note = 2'O-methyl-guanosine
  modified_base 12: mod_base = OTHER; note = 2'O-methyl-adenosine
  modified_base 13: mod_base = OTHER; note = 2'O-methyl-adenosine
  modified_base 14: mod_base = OTHER; note = 2' Fluoro-uridine
  modified_base 15: mod_base = OTHER; note = 2'O-methyl-uridine
  modified_base 16: mod_base = OTHER; note = 2' Fluoro-uridine
  modified_base 17: mod_base = OTHER; note = 2'O-methyl-adenosine
  modified_base 18: mod_base = OTHER; note = 2'O-methyl-uridine
  modified_base 19: mod_base = OTHER; note = 2'O-methyl-uridine
  modified_base 20: mod_base = OTHER; note = 2'O-methyl-cytidine
  modified_base 21: mod_base = OTHER; note = 2'O-methyl-adenosine
  modified_base 22: mod_base = OTHER; note = 2'O-methyl-cytidine
  modified_base 23: mod_base = OTHER; note = 2'O-methyl-cytidine
  modified_base 1..2: mod_base = OTHER; note = phosphorothioate linkage
  modified_base 2..3: mod_base = OTHER; note = phosphorothioate linkage
  modified_base 21..22: mod_base = OTHER; note = phosphorothioate linkage
  modified_base 22..23: mod_base = OTHER; note = phosphorothioate linkage
  source 1..23: mol_type = other RNA
tttccactgggaatttattcacc

SEQ ID NO: 543 - RNA, 23 nt, synthetic construct
  misc_feature 1..23: note = siRNA sequence name:ETXS594
  modified_base 1: mod_base = OTHER; note = 2'O-methyl-guanosine
  modified_base 2: mod_base = OTHER; note = 2'Fluoro-adenosine
  modified_base 3: mod_base = OTHER; note = 2'O-methyl-uridine
  modified_base 4: mod_base = OTHER; note = 2' Fluoro-cytidine
  modified_base 5: mod_base = OTHER; note = 2'O-methyl-cytidine
  modified_base 6: mod_base = OTHER; note = 2' Fluoro-uridine
  modified_base 7: mod_base = OTHER; note = 2'O-methyl-uridine
  modified_base 8: mod_base = OTHER; note = 2'O-methyl-uridine
  modified_base 9: mod_base = OTHER; note = 2'O-methyl-guanosine
  modified_base 10: mod_base = OTHER; note = 2'O-methyl-adenosine
  modified_base 11: mod_base = OTHER; note = 2'O-methyl-adenosine
  modified_base 12: mod_base = OTHER; note = 2'O-methyl-guanosine
  modified_base 13: mod_base = OTHER; note = 2'O-methyl-uridine
  modified_base 14: mod_base = OTHER; note = 2'Fluoro-adenosine
  modified_base 15: mod_base = OTHER; note = 2'O-methyl-guanosine
  modified_base 16: mod_base = OTHER; note = 2'Fluoro-adenosine
  modified_base 17: mod_base = OTHER; note = 2'O-methyl-uridine
  modified_base 18: mod_base = OTHER; note = 2'O-methyl-guanosine
  modified_base 19: mod_base = OTHER; note = 2'O-methyl-cytidine
  modified_base 20: mod_base = OTHER; note = 2'O-methyl-adenosine
  modified_base 21: mod_base = OTHER; note = 2'O-methyl-guanosine
  modified_base 22: mod_base = OTHER; note = 2'O-methyl-uridine
  modified_base 23: mod_base = OTHER; note = 2'O-methyl-uridine
  modified_base 1..2: mod_base = OTHER; note = phosphorothioate linkage
  modified_base 2..3: mod_base = OTHER; note = phosphorothioate linkage
  modified_base 21..22: mod_base = OTHER; note = phosphorothioate linkage
  modified_base 22..23: mod_base = OTHER; note = phosphorothioate linkage
  source 1..23: mol_type = other RNA
gatcctttgaagtagatgcagtt

SEQ ID NO: 544 - RNA, 23 nt, synthetic construct
  misc_feature 1..23: note = siRNA sequence name:ETXS596
  modified_base 1: mod_base = OTHER; note = 2'O-methyl-adenosine
  modified_base 2: mod_base = OTHER; note = 2' Fluoro-uridine
  modified_base 3: mod_base = OTHER; note = 2'O-methyl-cytidine
  modified_base 4: mod_base = OTHER; note = 2' Fluoro-cytidine
  modified_base 5: mod_base = OTHER; note = 2'O-methyl-uridine
  modified_base 6: mod_base = OTHER; note = 2' Fluoro-uridine
  modified_base 7: mod_base = OTHER; note = 2'O-methyl-uridine
  modified_base 8: mod_base = OTHER; note = 2'O-methyl-guanosine
  modified_base 9: mod_base = OTHER; note = 2'O-methyl-adenosine
  modified_base 10: mod_base = OTHER; note = 2'O-methyl-adenosine
  modified_base 11: mod_base = OTHER; note = 2'O-methyl-guanosine
  modified_base 12: mod_base = OTHER; note = 2'O-methyl-uridine
  modified_base 13: mod_base = OTHER; note = 2'O-methyl-adenosine
  modified_base 14: mod_base = OTHER; note = 2' Fluoro-guanosine
  modified_base 15: mod_base = OTHER; note = 2'O-methyl-adenosine
  modified_base 16: mod_base = OTHER; note = 2' Fluoro-uridine
  modified_base 17: mod_base = OTHER; note = 2'O-methyl-guanosine
  modified_base 18: mod_base = OTHER; note = 2'O-methyl-cytidine
  modified_base 19: mod_base = OTHER; note = 2'O-methyl-adenosine
  modified_base 20: mod_base = OTHER; note = 2'O-methyl-guanosine
  modified_base 21: mod_base = OTHER; note = 2'O-methyl-uridine
  modified_base 22: mod_base = OTHER; note = 2'O-methyl-uridine
  modified_base 23: mod_base = OTHER; note = 2'O-methyl-guanosine
  modified_base 1..2: mod_base = OTHER; note = phosphorothioate linkage
  modified_base 2..3: mod_base = OTHER; note = phosphorothioate linkage
  modified_base 21..22: mod_base = OTHER; note = phosphorothioate linkage
  modified_base 22..23: mod_base = OTHER; note = phosphorothioate linkage
  source 1..23: mol_type = other RNA
atcctttgaagtagatgcagttg

SEQ ID NO: 545 - RNA, 23 nt, synthetic construct
  misc_feature 1..23: note = siRNA sequence name:ETXS598
  modified_base 1: mod_base = OTHER; note = 2'O-methyl-adenosine
  modified_base 2: mod_base = OTHER; note = 2' Fluoro-cytidine
  modified_base 3: mod_base = OTHER; note = 2'O-methyl-uridine
  modified_base 4: mod_base = OTHER; note = 2' Fluoro-uridine
  modified_base 5: mod_base = OTHER; note = 2'O-methyl-guanosine
  modified_base 6: mod_base = OTHER; note = 2' Fluoro-uridine
  modified_base 7: mod_base = OTHER; note = 2'O-methyl-uridine
  modified_base 8: mod_base = OTHER; note = 2'O-methyl-cytidine
  modified_base 9: mod_base = OTHER; note = 2'O-methyl-adenosine
  modified_base 10: mod_base = OTHER; note = 2'O-methyl-uridine
  modified_base 11: mod_base = OTHER; note = 2'O-methyl-guanosine
  modified_base 12: mod_base = OTHER; note = 2'O-methyl-guanosine
  modified_base 13: mod_base = OTHER; note = 2'O-methyl-guanosine
  modified_base 14: mod_base = OTHER; note = 2' Fluoro-uridine
  modified_base 15: mod_base = OTHER; note = 2'O-methyl-cytidine
  modified_base 16: mod_base = OTHER; note = 2' Fluoro-uridine
  modified_base 17: mod_base = OTHER; note = 2'O-methyl-cytidine
  modified_base 18: mod_base = OTHER; note = 2'O-methyl-uridine
  modified_base 19: mod_base = OTHER; note = 2'O-methyl-cytidine
  modified_base 20: mod_base = OTHER; note = 2'O-methyl-cytidine
  modified_base 21: mod_base = OTHER; note = 2'O-methyl-cytidine
  modified_base 22: mod_base = OTHER; note = 2'O-methyl-uridine
  modified_base 23: mod_base = OTHER; note = 2'O-methyl-uridine
  modified_base 1..2: mod_base = OTHER; note = phosphorothioate linkage
  modified_base 2..3: mod_base = OTHER; note = phosphorothioate linkage
  modified_base 21..22: mod_base = OTHER; note = phosphorothioate linkage
  modified_base 22..23: mod_base = OTHER; note = phosphorothioate linkage
  source 1..23: mol_type = other RNA
acttgttcatgggtctctccctt

SEQ ID NO: 546 - RNA, 23 nt, synthetic construct
  misc_feature 1..23: note = siRNA sequence name:ETXS600
  modified_base 1: mod_base = OTHER; note = 2'O-methyl-uridine
  modified_base 2: mod_base = OTHER; note = 2' Fluoro-cytidine
  modified_base 3: mod_base = OTHER; note = 2'O-methyl-cytidine
  modified_base 4: mod_base = OTHER; note = 2'Fluoro-adenosine
  modified_base 5: mod_base = OTHER; note = 2'O-methyl-cytidine
  modified_base 6: mod_base = OTHER; note = 2' Fluoro-uridine
  modified_base 7: mod_base = OTHER; note = 2'O-methyl-guanosine
  modified_base 8: mod_base = OTHER; note = 2'O-methyl-guanosine
  modified_base 9: mod_base = OTHER; note = 2'O-methyl-guanosine
  modified_base 10: mod_base = OTHER; note = 2'O-methyl-adenosine
  modified_base 11: mod_base = OTHER; note = 2'O-methyl-adenosine
  modified_base 12: mod_base = OTHER; note = 2'O-methyl-uridine
  modified_base 13: mod_base = OTHER; note = 2'O-methyl-uridine
  modified_base 14: mod_base = OTHER; note = 2' Fluoro-uridine
  modified_base 15: mod_base = OTHER; note = 2'O-methyl-adenosine
  modified_base 16: mod_base = OTHER; note = 2' Fluoro-uridine
  modified_base 17: mod_base = OTHER; note = 2'O-methyl-uridine
  modified_base 18: mod_base = OTHER; note = 2'O-methyl-cytidine
  modified_base 19: mod_base = OTHER; note = 2'O-methyl-adenosine
  modified_base 20: mod_base = OTHER; note = 2'O-methyl-cytidine
  modified_base 21: mod_base = OTHER; note = 2'O-methyl-cytidine
  modified_base 22: mod_base = OTHER; note = 2'O-methyl-cytidine
  modified_base 23: mod_base = OTHER; note = 2'O-methyl-adenosine
  modified_base 1..2: mod_base = OTHER; note = phosphorothioate linkage
  modified_base 2..3: mod_base = OTHER; note = phosphorothioate linkage
  modified_base 21..22: mod_base = OTHER; note = phosphorothioate linkage
  modified_base 22..23: mod_base = OTHER; note = phosphorothioate linkage
  source 1..23: mol_type = other RNA
tccactgggaatttattcaccca

SEQ ID NO: 547 - RNA, 23 nt, synthetic construct
  misc_feature 1..23: note = siRNA sequence name:ETXS602
  modified_base 1: mod_base = OTHER; note = 2'O-methyl-uridine
  modified_base 2: mod_base = OTHER; note = 2' Fluoro-guanosine
  modified_base 3: mod_base = OTHER; note = 2'O-methyl-uridine
  modified_base 4: mod_base = OTHER; note = 2'Fluoro-adenosine
  modified_base 5: mod_base = OTHER; note = 2'O-methyl-cytidine
  modified_base 6: mod_base = OTHER; note = 2' Fluoro-cytidine
  modified_base 7: mod_base = OTHER; note = 2'O-methyl-cytidine
  modified_base 8: mod_base = OTHER; note = 2'O-methyl-adenosine
  modified_base 9: mod_base = OTHER; note = 2'O-methyl-adenosine
  modified_base 10: mod_base = OTHER; note = 2'O-methyl-adenosine
  modified_base 11: mod_base = OTHER; note = 2'O-methyl-adenosine
  modified_base 12: mod_base = OTHER; note = 2'O-methyl-uridine
  modified_base 13: mod_base = OTHER; note = 2'O-methyl-uridine
  modified_base 14: mod_base = OTHER; note = 2' Fluoro-cytidine
  modified_base 15: mod_base = OTHER; note = 2'O-methyl-cytidine
  modified_base 16: mod_base = OTHER; note = 2' Fluoro-uridine
  modified_base 17: mod_base = OTHER; note = 2'O-methyl-cytidine
  modified_base 18: mod_base = OTHER; note = 2'O-methyl-cytidine
  modified_base 19: mod_base = OTHER; note = 2'O-methyl-uridine
  modified_base 20: mod_base = OTHER; note = 2'O-methyl-guanosine
  modified_base 21: mod_base = OTHER; note = 2'O-methyl-adenosine
  modified_base 22: mod_base = OTHER; note = 2'O-methyl-adenosine
  modified_base 23: mod_base = OTHER; note = 2'O-methyl-guanosine
  modified_base 1..2: mod_base = OTHER; note = phosphorothioate linkage
  modified_base 2..3: mod_base = OTHER; note = phosphorothioate linkage
  modified_base 21..22: mod_base = OTHER; note = phosphorothioate linkage
  modified_base 22..23: mod_base = OTHER; note = phosphorothioate linkage
  source 1..23: mol_type = other RNA
tgtacccaaaattcctcctgaag

SEQ ID NO: 548 - RNA, 23 nt, synthetic construct
  misc_feature 1..23: note = siRNA sequence name:ETXS604
  modified_base 1: mod_base = OTHER; note = 2'O-methyl-uridine
  modified_base 2: mod_base = OTHER; note = 2' Fluoro-uridine
  modified_base 3: mod_base = OTHER; note = 2'O-methyl-cytidine
  modified_base 4: mod_base = OTHER; note = 2' Fluoro-cytidine
  modified_base 5: mod_base = OTHER; note = 2'O-methyl-cytidine
  modified_base 6: mod_base = OTHER; note = 2'Fluoro-adenosine
  modified_base 7: mod_base = OTHER; note = 2'O-methyl-uridine
  modified_base 8: mod_base = OTHER; note = 2'O-methyl-guanosine
  modified_base 9: mod_base = OTHER; note = 2'O-methyl-adenosine
  modified_base 10: mod_base = OTHER; note = 2'O-methyl-adenosine
  modified_base 11: mod_base = OTHER; note = 2'O-methyl-guanosine
  modified_base 12: mod_base = OTHER; note = 2'O-methyl-adenosine
  modified_base 13: mod_base = OTHER; note = 2'O-methyl-guanosine
  modified_base 14: mod_base = OTHER; note = 2' Fluoro-cytidine
  modified_base 15: mod_base = OTHER; note = 2'O-methyl-adenosine
  modified_base 16: mod_base = OTHER; note = 2' Fluoro-guanosine
  modified_base 17: mod_base = OTHER; note = 2'O-methyl-guanosine
  modified_base 18: mod_base = OTHER; note = 2'O-methyl-cytidine
  modified_base 19: mod_base = OTHER; note = 2'O-methyl-adenosine
  modified_base 20: mod_base = OTHER; note = 2'O-methyl-guanosine
  modified_base 21: mod_base = OTHER; note = 2'O-methyl-cytidine
  modified_base 22: mod_base = OTHER; note = 2'O-methyl-uridine
  modified_base 23: mod_base = OTHER; note = 2'O-methyl-guanosine
  modified_base 1..2: mod_base = OTHER; note = phosphorothioate linkage
  modified_base 2..3: mod_base = OTHER; note = phosphorothioate linkage
  modified_base 21..22: mod_base = OTHER; note = phosphorothioate linkage
  modified_base 22..23: mod_base = OTHER; note = phosphorothioate linkage
  source 1..23: mol_type = other RNA
ttcccatgaagagcaggcagctg

SEQ ID NO: 549 - RNA, 23 nt, synthetic construct
  misc_feature 1..23: note = siRNA sequence name:ETXS606
  modified_base 1: mod_base = OTHER; note = 2'O-methyl-uridine
  modified_base 2: mod_base = OTHER; note = 2' Fluoro-cytidine
  modified_base 3: mod_base = OTHER; note = 2'O-methyl-uridine
  modified_base 4: mod_base = OTHER; note = 2' Fluoro-uridine
  modified_base 5: mod_base = OTHER; note = 2'O-methyl-uridine
  modified_base 6: mod_base = OTHER; note = 2' Fluoro-uridine
  modified_base 7: mod_base = OTHER; note = 2'O-methyl-adenosine
  modified_base 8: mod_base = OTHER; note = 2'O-methyl-uridine
  modified_base 9: mod_base = OTHER; note = 2'O-methyl-guanosine
  modified_base 10: mod_base = OTHER; note = 2'O-methyl-adenosine
  modified_base 11: mod_base = OTHER; note = 2'O-methyl-guanosine
  modified_base 12: mod_base = OTHER; note = 2'O-methyl-guanosine
  modified_base 13: mod_base = OTHER; note = 2'O-methyl-cytidine
  modified_base 14: mod_base = OTHER; note = 2' Fluoro-cytidine
  modified_base 15: mod_base = OTHER; note = 2'O-methyl-cytidine
  modified_base 16: mod_base = OTHER; note = 2' Fluoro-uridine
  modified_base 17: mod_base = OTHER; note = 2'O-methyl-uridine
  modified_base 18: mod_base = OTHER; note = 2'O-methyl-guanosine
  modified_base 19: mod_base = OTHER; note = 2'O-methyl-guanosine
  modified_base 20: mod_base = OTHER; note = 2'O-methyl-uridine
  modified_base 21: mod_base = OTHER; note = 2'O-methyl-guanosine
  modified_base 22: mod_base = OTHER; note = 2'O-methyl-adenosine
  modified_base 23: mod_base = OTHER; note = 2'O-methyl-guanosine
  modified_base 1..2: mod_base = OTHER; note = phosphorothioate linkage
  modified_base 2..3: mod_base = OTHER; note = phosphorothioate linkage
  modified_base 21..22: mod_base = OTHER; note = phosphorothioate linkage
  modified_base 22..23: mod_base = OTHER; note = phosphorothioate linkage
  source 1..23: mol_type = other RNA
tcttttatgaggcccttggtgag

SEQ ID NO: 550 - RNA, 23 nt, synthetic construct
  misc_feature 1..23: note = siRNA sequence name:ETXS608
  modified_base 1: mod_base = OTHER; note = 2'O-methyl-adenosine
  modified_base 2: mod_base = OTHER; note = 2'Fluoro-adenosine
  modified_base 3: mod_base = OTHER; note = 2'O-methyl-cytidine
  modified_base 4: mod_base = OTHER; note = 2' Fluoro-uridine
  modified_base 5: mod_base = OTHER; note = 2'O-methyl-guanosine
  modified_base 6: mod_base = OTHER; note = 2' Fluoro-cytidine
  modified_base 7: mod_base = OTHER; note = 2'O-methyl-uridine
  modified_base 8: mod_base = OTHER; note = 2'O-methyl-uridine
  modified_base 9: mod_base = OTHER; note = 2'O-methyl-cytidine
  modified_base 10: mod_base = OTHER; note = 2'O-methyl-uridine
  modified_base 11: mod_base = OTHER; note = 2'O-methyl-guanosine
  modified_base 12: mod_base = OTHER; note = 2'O-methyl-guanosine
  modified_base 13: mod_base = OTHER; note = 2'O-methyl-adenosine
  modified_base 14: mod_base = OTHER; note = 2' Fluoro-uridine
  modified_base 15: mod_base = OTHER; note = 2'O-methyl-adenosine
  modified_base 16: mod_base = OTHER; note = 2' Fluoro-uridine
  modified_base 17: mod_base = OTHER; note = 2'O-methyl-adenosine
  modified_base 18: mod_base = OTHER; note = 2'O-methyl-adenosine
  modified_base 19: mod_base = OTHER; note = 2'O-methyl-adenosine
  modified_base 20: mod_base = OTHER; note = 2'O-methyl-guanosine
  modified_base 21: mod_base = OTHER; note = 2'O-methyl-guanosine
  modified_base 22: mod_base = OTHER; note = 2'O-methyl-uridine
  modified_base 23: mod_base = OTHER; note = 2'O-methyl-cytidine
  modified_base 1..2: mod_base = OTHER; note = phosphorothioate linkage
  modified_base 2..3: mod_base = OTHER; note = phosphorothioate linkage
  modified_base 21..22: mod_base = OTHER; note = phosphorothioate linkage
  modified_base 22..23: mod_base = OTHER; note = phosphorothioate linkage
  source 1..23: mol_type = other RNA
aactgcttctggatataaaggtc

SEQ ID NO: 551 - RNA, 23 nt, synthetic construct
  misc_feature 1..23: note = siRNA sequence name:ETXS610
  modified_base 1: mod_base = OTHER; note = 2'O-methyl-cytidine
  modified_base 2: mod_base = OTHER; note = 2' Fluoro-cytidine
  modified_base 3: mod_base = OTHER; note = 2'O-methyl-uridine
  modified_base 4: mod_base = OTHER; note = 2' Fluoro-uridine
  modified_base 5: mod_base = OTHER; note = 2'O-methyl-uridine
  modified_base 6: mod_base = OTHER; note = 2' Fluoro-guanosine
  modified_base 7: mod_base = OTHER; note = 2'O-methyl-adenosine
  modified_base 8: mod_base = OTHER; note = 2'O-methyl-adenosine
  modified_base 9: mod_base = OTHER; note = 2'O-methyl-guanosine
  modified_base 10: mod_base = OTHER; note = 2'O-methyl-uridine
  modified_base 11: mod_base = OTHER; note = 2'O-methyl-adenosine
  modified_base 12: mod_base = OTHER; note = 2'O-methyl-guanosine
  modified_base 13: mod_base = OTHER; note = 2'O-methyl-adenosine
  modified_base 14: mod_base = OTHER; note = 2' Fluoro-uridine
  modified_base 15: mod_base = OTHER; note = 2'O-methyl-guanosine
  modified_base 16: mod_base = OTHER; note = 2' Fluoro-cytidine
  modified_base 17: mod_base = OTHER; note = 2'O-methyl-adenosine
  modified_base 18: mod_base = OTHER; note = 2'O-methyl-guanosine
  modified_base 19: mod_base = OTHER; note = 2'O-methyl-uridine
  modified_base 20: mod_base = OTHER; note = 2'O-methyl-uridine
  modified_base 21: mod_base = OTHER; note = 2'O-methyl-guanosine
  modified_base 22: mod_base = OTHER; note = 2'O-methyl-adenosine
  modified_base 23: mod_base = OTHER; note = 2'O-methyl-guanosine
  modified_base 1..2: mod_base = OTHER; note = phosphorothioate linkage
  modified_base 2..3: mod_base = OTHER; note = phosphorothioate linkage
  modified_base 21..22: mod_base = OTHER; note = phosphorothioate linkage
  modified_base 22..23: mod_base = OTHER; note = phosphorothioate linkage
  source 1..23: mol_type = other RNA
cctttgaagtagatgcagttgag

SEQ ID NO: 552 - RNA, 23 nt, synthetic construct
  misc_feature 1..23: note = siRNA sequence name:ETXS612
  modified_base 1: mod_base = OTHER; note = 2'O-methyl-uridine
  modified_base 2: mod_base = OTHER; note = 2' Fluoro-uridine
  modified_base 3: mod_base = OTHER; note = 2'O-methyl-adenosine
  modified_base 4: mod_base = OTHER; note = 2'Fluoro-adenosine
  modified_base 5: mod_base = OTHER; note = 2'O-methyl-guanosine
  modified_base 6: mod_base = OTHER; note = 2'Fluoro-adenosine
  modified_base 7: mod_base = OTHER; note = 2'O-methyl-cytidine
  modified_base 8: mod_base = OTHER; note = 2'O-methyl-guanosine
  modified_base 9: mod_base = OTHER; note = 2'O-methyl-cytidine
  modified_base 10: mod_base = OTHER; note = 2'O-methyl-uridine
  modified_base 11: mod_base = OTHER; note = 2'O-methyl-guanosine
  modified_base 12: mod_base = OTHER; note = 2'O-methyl-guanosine
  modified_base 13: mod_base = OTHER; note = 2'O-methyl-adenosine
  modified_base 14: mod_base = OTHER; note = 2' Fluoro-uridine
  modified_base 15: mod_base = OTHER; note = 2'O-methyl-cytidine
  modified_base 16: mod_base = OTHER; note = 2' Fluoro-cytidine
  modified_base 17: mod_base = OTHER; note = 2'O-methyl-guanosine
  modified_base 18: mod_base = OTHER; note = 2'O-methyl-guanosine
  modified_base 19: mod_base = OTHER; note = 2'O-methyl-cytidine
  modified_base 20: mod_base = OTHER; note = 2'O-methyl-uridine
  modified_base 21: mod_base = OTHER; note = 2'O-methyl-cytidine
  modified_base 22: mod_base = OTHER; note = 2'O-methyl-uridine
  modified_base 23: mod_base = OTHER; note = 2'O-methyl-uridine
  modified_base 1..2: mod_base = OTHER; note = phosphorothioate linkage
  modified_base 2..3: mod_base = OTHER; note = phosphorothioate linkage
  modified_base 21..22: mod_base = OTHER; note = phosphorothioate linkage
  modified_base 22..23: mod_base = OTHER; note = phosphorothioate linkage
  source 1..23: mol_type = other RNA
ttaagacgctggatccggctctt

SEQ ID NO: 553 - RNA, 23 nt, synthetic construct
  misc_feature 1..23: note = siRNA sequence name:ETXS614
  modified_base 1: mod_base = OTHER; note = 2'O-methyl-guanosine
  modified_base 2: mod_base = OTHER; note = 2'Fluoro-adenosine
  modified_base 3: mod_base = OTHER; note = 2'O-methyl-guanosine
  modified_base 4: mod_base = OTHER; note = 2' Fluoro-guanosine
  modified_base 5: mod_base = OTHER; note = 2'O-methyl-adenosine
  modified_base 6: mod_base = OTHER; note = 2' Fluoro-uridine
  modified_base 7: mod_base = OTHER; note = 2'O-methyl-guanosine
  modified_base 8: mod_base = OTHER; note = 2'O-methyl-uridine
  modified_base 9: mod_base = OTHER; note = 2'O-methyl-uridine
  modified_base 10: mod_base = OTHER; note = 2'O-methyl-adenosine
  modified_base 11: mod_base = OTHER; note = 2'O-methyl-adenosine
  modified_base 12: mod_base = OTHER; note = 2'O-methyl-guanosine
  modified_base 13: mod_base = OTHER; note = 2'O-methyl-adenosine
  modified_base 14: mod_base = OTHER; note = 2' Fluoro-cytidine
  modified_base 15: mod_base = OTHER; note = 2'O-methyl-guanosine
  modified_base 16: mod_base = OTHER; note = 2' Fluoro-cytidine
  modified_base 17: mod_base = OTHER; note = 2'O-methyl-uridine
  modified_base 18: mod_base = OTHER; note = 2'O-methyl-guanosine
  modified_base 19: mod_base = OTHER; note = 2'O-methyl-guanosine
  modified_base 20: mod_base = OTHER; note = 2'O-methyl-adenosine
  modified_base 21: mod_base = OTHER; note = 2'O-methyl-uridine
  modified_base 22: mod_base = OTHER; note = 2'O-methyl-cytidine
  modified_base 23: mod_base = OTHER; note = 2'O-methyl-cytidine
  modified_base 1..2: mod_base = OTHER; note = phosphorothioate linkage
  modified_base 2..3: mod_base = OTHER; note = phosphorothioate linkage
  modified_base 21..22: mod_base = OTHER; note = phosphorothioate linkage
  modified_base 22..23: mod_base = OTHER; note = phosphorothioate linkage
  source 1..23: mol_type = other RNA
gaggatgttaagacgctggatcc

SEQ ID NO: 554 - RNA, 23 nt, synthetic construct
  misc_feature 1..23: note = siRNA sequence name:ETXS616
  modified_base 1: mod_base = OTHER; note = 2'O-methyl-uridine
  modified_base 2: mod_base = OTHER; note = 2' Fluoro-cytidine
  modified_base 3: mod_base = OTHER; note = 2'O-methyl-uridine
  modified_base 4: mod_base = OTHER; note = 2' Fluoro-guanosine
  modified_base 5: mod_base = OTHER; note = 2'O-methyl-uridine
  modified_base 6: mod_base = OTHER; note = 2' Fluoro-uridine
  modified_base 7: mod_base = OTHER; note = 2'O-methyl-uridine
  modified_base 8: mod_base = OTHER; note = 2'O-methyl-guanosine
  modified_base 9: mod_base = OTHER; note = 2'O-methyl-uridine
  modified_base 10: mod_base = OTHER; note = 2'O-methyl-cytidine
  modified_base 11: mod_base = OTHER; note = 2'O-methyl-adenosine
  modified_base 12: mod_base = OTHER; note = 2'O-methyl-uridine
  modified_base 13: mod_base = OTHER; note = 2'O-methyl-guanosine
  modified_base 14: mod_base = OTHER; note = 2' Fluoro-cytidine
  modified_base 15: mod_base = OTHER; note = 2'O-methyl-uridine
  modified_base 16: mod_base = OTHER; note = 2' Fluoro-uridine
  modified_base 17: mod_base = OTHER; note = 2'O-methyl-uridine
  modified_base 18: mod_base = OTHER; note = 2'O-methyl-uridine
  modified_base 19: mod_base = OTHER; note = 2'O-methyl-uridine
  modified_base 20: mod_base = OTHER; note = 2'O-methyl-uridine
  modified_base 21: mod_base = OTHER; note = 2'O-methyl-guanosine
  modified_base 22: mod_base = OTHER; note = 2'O-methyl-cytidine
  modified_base 23: mod_base = OTHER; note = 2'O-methyl-cytidine
  modified_base 1..2: mod_base = OTHER; note = phosphorothioate linkage
  modified_base 2..3: mod_base = OTHER; note = phosphorothioate linkage
  modified_base 21..22: mod_base = OTHER; note = phosphorothioate linkage
  modified_base 22..23: mod_base = OTHER; note = phosphorothioate linkage
  source 1..23: mol_type = other RNA
tctgtttgtcatgcttttttgcc

SEQ ID NO: 555 - RNA, 23 nt, synthetic construct
  misc_feature 1..23: note = siRNA sequence name:ETXS618
  modified_base 1: mod_base = OTHER; note = 2'O-methyl-guanosine
  modified_base 2: mod_base = OTHER; note = 2' Fluoro-uridine
  modified_base 3: mod_base = OTHER; note = 2'O-methyl-guanosine
  modified_base 4: mod_base = OTHER; note = 2' Fluoro-uridine
  modified_base 5: mod_base = OTHER; note = 2'O-methyl-adenosine
  modified_base 6: mod_base = OTHER; note = 2' Fluoro-cytidine
  modified_base 7: mod_base = OTHER; note = 2'O-methyl-cytidine
  modified_base 8: mod_base = OTHER; note = 2'O-methyl-cytidine
  modified_base 9: mod_base = OTHER; note = 2'O-methyl-adenosine
  modified_base 10: mod_base = OTHER; note = 2'O-methyl-adenosine
  modified_base 11: mod_base = OTHER; note = 2'O-methyl-adenosine
  modified_base 12: mod_base = OTHER; note = 2'O-methyl-adenosine
  modified_base 13: mod_base = OTHER; note = 2'O-methyl-uridine
  modified_base 14: mod_base = OTHER; note = 2' Fluoro-uridine
  modified_base 15: mod_base = OTHER; note = 2'O-methyl-cytidine
  modified_base 16: mod_base = OTHER; note = 2' Fluoro-cytidine
  modified_base 17: mod_base = OTHER; note = 2'O-methyl-uridine
  modified_base 18: mod_base = OTHER; note = 2'O-methyl-cytidine
  modified_base 19: mod_base = OTHER; note = 2'O-methyl-cytidine
  modified_base 20: mod_base = OTHER; note = 2'O-methyl-uridine
  modified_base 21: mod_base = OTHER; note = 2'O-methyl-guanosine
  modified_base 22: mod_base = OTHER; note = 2'O-methyl-adenosine
  modified_base 23: mod_base = OTHER; note = 2'O-methyl-adenosine
  modified_base 1..2: mod_base = OTHER; note = phosphorothioate linkage
  modified_base 2..3: mod_base = OTHER; note = phosphorothioate linkage
  modified_base 21..22: mod_base = OTHER; note = phosphorothioate linkage
  modified_base 22..23: mod_base = OTHER; note = phosphorothioate linkage
  source 1..23: mol_type = other RNA
gtgtacccaaaattcctcctgaa

SEQ ID NO: 556 - RNA, 23 nt, synthetic construct
  misc_feature 1..23: note = siRNA sequence name:ETXS620
  modified_base 1: mod_base = OTHER; note = 2'O-methyl-uridine
  modified_base 2: mod_base = OTHER; note = 2' Fluoro-uridine
  modified_base 3: mod_base = OTHER; note = 2'O-methyl-cytidine
  modified_base 4: mod_base = OTHER; note = 2'Fluoro-adenosine
  modified_base 5: mod_base = OTHER; note = 2'O-methyl-guanosine
  modified_base 6: mod_base = OTHER; note = 2' Fluoro-cytidine
  modified_base 7: mod_base = OTHER; note = 2'O-methyl-cytidine
  modified_base 8: mod_base = OTHER; note = 2'O-methyl-guanosine
  modified_base 9: mod_base = OTHER; note = 2'O-methyl-guanosine
  modified_base 10: mod_base = OTHER; note = 2'O-methyl-adenosine
  modified_base 11: mod_base = OTHER; note = 2'O-methyl-adenosine
  modified_base 12: mod_base = OTHER; note = 2'O-methyl-guanosine
  modified_base 13: mod_base = OTHER; note = 2'O-methyl-uridine
  modified_base 14: mod_base = OTHER; note = 2' Fluoro-uridine
  modified_base 15: mod_base = OTHER; note = 2'O-methyl-guanosine
  modified_base 16: mod_base = OTHER; note = 2' Fluoro-uridine
  modified_base 17: mod_base = OTHER; note = 2'O-methyl-guanosine
  modified_base 18: mod_base = OTHER; note = 2'O-methyl-guanosine
  modified_base 19: mod_base = OTHER; note = 2'O-methyl-uridine
  modified_base 20: mod_base = OTHER; note = 2'O-methyl-uridine
  modified_base 21: mod_base = OTHER; note = 2'O-methyl-guanosine
  modified_base 22: mod_base = OTHER; note = 2'O-methyl-uridine
  modified_base 23: mod_base = OTHER; note = 2'O-methyl-guanosine
  modified_base 1..2: mod_base = OTHER; note = phosphorothioate linkage
  modified_base 2..3: mod_base = OTHER; note = phosphorothioate linkage
  modified_base 21..22: mod_base = OTHER; note = phosphorothioate linkage
  modified_base 22..23: mod_base = OTHER; note = phosphorothioate linkage
  source 1..23: mol_type = other RNA
ttcagccggaagttgtggttgtg

SEQ ID NO: 557 - RNA, 23 nt, synthetic construct
  misc_feature 1..23: note = siRNA sequence name:ETXS622
  modified_base 1: mod_base = OTHER; note = 2'O-methyl-uridine
  modified_base 2: mod_base = OTHER; note = 2' Fluoro-guanosine
  modified_base 3: mod_base = OTHER; note = 2'O-methyl-uridine
  modified_base 4: mod_base = OTHER; note = 2' Fluoro-uridine
  modified_base 5: mod_base = OTHER; note = 2'O-methyl-uridine
  modified_base 6: mod_base = OTHER; note = 2' Fluoro-guanosine
  modified_base 7: mod_base = OTHER; note = 2'O-methyl-uridine
  modified_base 8: mod_base = OTHER; note = 2'O-methyl-cytidine
  modified_base 9: mod_base = OTHER; note = 2'O-methyl-adenosine
  modified_base 10: mod_base = OTHER; note = 2'O-methyl-uridine
  modified_base 11: mod_base = OTHER; note = 2'O-methyl-guanosine
  modified_base 12: mod_base = OTHER; note = 2'O-methyl-cytidine
  modified_base 13: mod_base = OTHER; note = 2'O-methyl-uridine
  modified_base 14: mod_base = OTHER; note = 2' Fluoro-uridine
  modified_base 15: mod_base = OTHER; note = 2'O-methyl-uridine
  modified_base 16: mod_base = OTHER; note = 2' Fluoro-uridine
  modified_base 17: mod_base = OTHER; note = 2'O-methyl-uridine
  modified_base 18: mod_base = OTHER; note = 2'O-methyl-uridine
  modified_base 19: mod_base = OTHER; note = 2'O-methyl-guanosine
  modified_base 20: mod_base = OTHER; note = 2'O-methyl-cytidine
  modified_base 21: mod_base = OTHER; note = 2'O-methyl-cytidine
  modified_base 22: mod_base = OTHER; note = 2'O-methyl-adenosine
  modified_base 23: mod_base = OTHER; note = 2'O-methyl-uridine
  modified_base 1..2: mod_base = OTHER; note = phosphorothioate linkage
  modified_base 2..3: mod_base = OTHER; note = phosphorothioate linkage
  modified_base 21..22: mod_base = OTHER; note = phosphorothioate linkage
  modified_base 22..23: mod_base = OTHER; note = phosphorothioate linkage
  source 1..23: mol_type = other RNA
tgtttgtcatgcttttttgccat

SEQ ID NO: 558 - RNA, 23 nt, synthetic construct
  misc_feature 1..23: note = siRNA sequence name:ETXS624
  modified_base 1: mod_base = OTHER; note = 2'O-methyl-adenosine
  modified_base 2: mod_base = OTHER; note = 2' Fluoro-uridine
  modified_base 3: mod_base = OTHER; note = 2'O-methyl-uridine
  modified_base 4: mod_base = OTHER; note = 2' Fluoro-uridine
  modified_base 5: mod_base = OTHER; note = 2'O-methyl-cytidine
  modified_base 6: mod_base = OTHER; note = 2' Fluoro-cytidine
  modified_base 7: mod_base = OTHER; note = 2'O-methyl-adenosine
  modified_base 8: mod_base = OTHER; note = 2'O-methyl-cytidine
  modified_base 9: mod_base = OTHER; note = 2'O-methyl-uridine
  modified_base 10: mod_base = OTHER; note = 2'O-methyl-guanosine
  modified_base 11: mod_base = OTHER; note = 2'O-methyl-guanosine
  modified_base 12: mod_base = OTHER; note = 2'O-methyl-guanosine
  modified_base 13: mod_base = OTHER; note = 2'O-methyl-adenosine
  modified_base 14: mod_base = OTHER; note = 2'Fluoro-adenosine
  modified_base 15: mod_base = OTHER; note = 2'O-methyl-uridine
  modified_base 16: mod_base = OTHER; note = 2' Fluoro-uridine
  modified_base 17: mod_base = OTHER; note = 2'O-methyl-uridine
  modified_base 18: mod_base = OTHER; note = 2'O-methyl-adenosine
  modified_base 19: mod_base = OTHER; note = 2'O-methyl-uridine
  modified_base 20: mod_base = OTHER; note = 2'O-methyl-uridine
  modified_base 21: mod_base = OTHER; note = 2'O-methyl-cytidine
  modified_base 22: mod_base = OTHER; note = 2'O-methyl-adenosine
  modified_base 23: mod_base = OTHER; note = 2'O-methyl-cytidine
  modified_base 1..2: mod_base = OTHER; note = phosphorothioate linkage
  modified_base 2..3: mod_base = OTHER; note = phosphorothioate linkage
  modified_base 21..22: mod_base = OTHER; note = phosphorothioate linkage
  modified_base 22..23: mod_base = OTHER; note = phosphorothioate linkage
  source 1..23: mol_type = other RNA
atttccactgggaatttattcac

SEQ ID NO: 559 - RNA, 23 nt, synthetic construct
  misc_feature 1..23: note = siRNA sequence name:ETXS626
  modified_base 1: mod_base = OTHER; note = 2'O-methyl-adenosine
  modified_base 2: mod_base = OTHER; note = 2' Fluoro-cytidine
  modified_base 3: mod_base = OTHER; note = 2'O-methyl-adenosine
  modified_base 4: mod_base = OTHER; note = 2'Fluoro-adenosine
  modified_base 5: mod_base = OTHER; note = 2'O-methyl-uridine
  modified_base 6: mod_base = OTHER; note = 2' Fluoro-uridine
  modified_base 7: mod_base = OTHER; note = 2'O-methyl-adenosine
  modified_base 8: mod_base = OTHER; note = 2'O-methyl-guanosine
  modified_base 9: mod_base = OTHER; note = 2'O-methyl-cytidine
  modified_base 10: mod_base = OTHER; note = 2'O-methyl-adenosine
  modified_base 11: mod_base = OTHER; note = 2'O-methyl-uridine
  modified_base 12: mod_base = OTHER; note = 2'O-methyl-guanosine
  modified_base 13: mod_base = OTHER; note = 2'O-methyl-cytidine
  modified_base 14: mod_base = OTHER; note = 2' Fluoro-uridine
  modified_base 15: mod_base = OTHER; note = 2'O-methyl-guanosine
  modified_base 16: mod_base = OTHER; note = 2'Fluoro-adenosine
  modified_base 17: mod_base = OTHER; note = 2'O-methyl-uridine
  modified_base 18: mod_base = OTHER; note = 2'O-methyl-guanosine
  modified_base 19: mod_base = OTHER; note = 2'O-methyl-cytidine
  modified_base 20: mod_base = OTHER; note = 2'O-methyl-cytidine
  modified_base 21: mod_base = OTHER; note = 2'O-methyl-cytidine
  modified_base 22: mod_base = OTHER; note = 2'O-methyl-cytidine
  modified_base 23: mod_base = OTHER; note = 2'O-methyl-cytidine
  modified_base 1..2: mod_base = OTHER; note = phosphorothioate linkage
  modified_base 2..3: mod_base = OTHER; note = phosphorothioate linkage
  modified_base 21..22: mod_base = OTHER; note = phosphorothioate linkage
  modified_base 22..23: mod_base = OTHER; note = phosphorothioate linkage
  source 1..23: mol_type = other RNA
acaattagcatgctgatgccccc

SEQ ID NO: 560 - RNA, 23 nt, synthetic construct
  misc_feature 1..23: note = siRNA sequence name:ETXS628
  modified_base 1: mod_base = OTHER; note = 2'O-methyl-guanosine
  modified_base 2: mod_base = OTHER; note = 2' Fluoro-uridine
  modified_base 3: mod_base = OTHER; note = 2'O-methyl-uridine
  modified_base 4: mod_base = OTHER; note = 2' Fluoro-cytidine
  modified_base 5: mod_base = OTHER; note = 2'O-methyl-uridine
  modified_base 6: mod_base = OTHER; note = 2' Fluoro-guanosine
  modified_base 7: mod_base = OTHER; note = 2'O-methyl-uridine
  modified_base 8: mod_base = OTHER; note = 2'O-methyl-uridine
  modified_base 9: mod_base = OTHER; note = 2'O-methyl-uridine
  modified_base 10: mod_base = OTHER; note = 2'O-methyl-guanosine
  modified_base 11: mod_base = OTHER; note = 2'O-methyl-uridine
  modified_base 12: mod_base = OTHER; note = 2'O-methyl-cytidine
  modified_base 13: mod_base = OTHER; note = 2'O-methyl-adenosine
  modified_base 14: mod_base = OTHER; note = 2' Fluoro-uridine
  modified_base 15: mod_base = OTHER; note = 2'O-methyl-guanosine
  modified_base 16: mod_base = OTHER; note = 2' Fluoro-cytidine
  modified_base 17: mod_base = OTHER; note = 2'O-methyl-uridine
  modified_base 18: mod_base = OTHER; note = 2'O-methyl-uridine
  modified_base 19: mod_base = OTHER; note = 2'O-methyl-uridine
  modified_base 20: mod_base = OTHER; note = 2'O-methyl-uridine
  modified_base 21: mod_base = OTHER; note = 2'O-methyl-uridine
  modified_base 22: mod_base = OTHER; note = 2'O-methyl-uridine
  modified_base 23: mod_base = OTHER; note = 2'O-methyl-guanosine
  modified_base 1..2: mod_base = OTHER; note = phosphorothioate linkage
  modified_base 2..3: mod_base = OTHER; note = phosphorothioate linkage
  modified_base 21..22: mod_base = OTHER; note = phosphorothioate linkage
  modified_base 22..23: mod_base = OTHER; note = phosphorothioate linkage
  source 1..23: mol_type = other RNA
gttctgtttgtcatgcttttttg

SEQ ID NO: 561 - RNA, 23 nt, synthetic construct
  misc_feature 1..23: note = siRNA sequence name:ETXS630
  modified_base 1: mod_base = OTHER; note = 2'O-methyl-guanosine
  modified_base 2: mod_base = OTHER; note = 2' Fluoro-guanosine
  modified_base 3: mod_base = OTHER; note = 2'O-methyl-cytidine
  modified_base 4: mod_base = OTHER; note = 2' Fluoro-cytidine
  modified_base 5: mod_base = OTHER; note = 2'O-methyl-uridine
  modified_base 6: mod_base = OTHER; note = 2' Fluoro-cytidine
  modified_base 7: mod_base = OTHER; note = 2'O-methyl-adenosine
  modified_base 8: mod_base = OTHER; note = 2'O-methyl-guanosine
  modified_base 9: mod_base = OTHER; note = 2'O-methyl-cytidine
  modified_base 10: mod_base = OTHER; note = 2'O-methyl-adenosine
  modified_base 11: mod_base = OTHER; note = 2'O-methyl-adenosine
  modified_base 12: mod_base = OTHER; note = 2'O-methyl-adenosine
  modified_base 13: mod_base = OTHER; note = 2'O-methyl-guanosine
  modified_base 14: mod_base = OTHER; note = 2' Fluoro-uridine
  modified_base 15: mod_base = OTHER; note = 2'O-methyl-adenosine
  modified_base 16: mod_base = OTHER; note = 2'Fluoro-adenosine
  modified_base 17: mod_base = OTHER; note = 2'O-methyl-uridine
  modified_base 18: mod_base = OTHER; note = 2'O-methyl-adenosine
  modified_base 19: mod_base = OTHER; note = 2'O-methyl-cytidine
  modified_base 20: mod_base = OTHER; note = 2'O-methyl-uridine
  modified_base 21: mod_base = OTHER; note = 2'O-methyl-cytidine
  modified_base 22: mod_base = OTHER; note = 2'O-methyl-uridine
  modified_base 23: mod_base = OTHER; note = 2'O-methyl-cytidine
  modified_base 1..2: mod_base = OTHER; note = phosphorothioate linkage
  modified_base 2..3: mod_base = OTHER; note = phosphorothioate linkage
  modified_base 21..22: mod_base = OTHER; note = phosphorothioate linkage
  modified_base 22..23: mod_base = OTHER; note = phosphorothioate linkage
  source 1..23: mol_type = other RNA
ggcctcagcaaagtaatactctc

SEQ ID NO: 562 - RNA, 21 nt, synthetic construct
  misc_feature 1..21: note = siRNA sequence name:ETXS231
  modified_base 1: mod_base = OTHER; note = 2'O-methyl-uridine
  modified_base 2: mod_base = OTHER; note = 2'O-methyl-guanosine
  modified_base 3: mod_base = OTHER; note = 2'O-methyl-adenosine
  modified_base 4: mod_base = OTHER; note = 2'O-methyl-adenosine
  modified_base 5: mod_base = OTHER; note = 2'O-methyl-uridine
  modified_base 6: mod_base = OTHER; note = 2'O-methyl-adenosine
  modified_base 7: mod_base = OTHER; note = 2'Fluoro-adenosine
  modified_base 8: mod_base = OTHER; note = 2'O-methyl-adenosine
  modified_base 9: mod_base = OTHER; note = 2' Fluoro-uridine
  modified_base 10: mod_base = OTHER; note = 2' Fluoro-uridine
  modified_base 11: mod_base = OTHER; note = 2' Fluoro-cytidine
  modified_base 12: mod_base = OTHER; note = 2'O-methyl-cytidine
  modified_base 13: mod_base = OTHER; note = 2'O-methyl-cytidine
  modified_base 14: mod_base = OTHER; note = 2'O-methyl-adenosine
  modified_base 15: mod_base = OTHER; note = 2'O-methyl-guanosine
  modified_base 16: mod_base = OTHER; note = 2'O-methyl-uridine
  modified_base 17: mod_base = OTHER; note = 2'O-methyl-guanosine
  modified_base 18: mod_base = OTHER; note = 2'O-methyl-guanosine
  modified_base 19: mod_base = OTHER; note = 2'O-methyl-adenosine
  modified_base 20: mod_base = OTHER; note = 2'O-methyl-adenosine
  modified_base 21: mod_base = OTHER; note = 2'O-methyl-adenosine
  modified_base 1..2: mod_base = OTHER; note = phosphorothioate linkage
  modified_base 2..3: mod_base = OTHER; note = phosphorothioate linkage
  modified_base 19..20: mod_base = OTHER; note = phosphorothioate linkage
  modified_base 20..21: mod_base = OTHER; note = phosphorothioate linkage
  source 1..21: mol_type = other RNA
tgaataaattcccagtggaaa

SEQ ID NO: 563 - RNA, 21 nt, synthetic construct
  misc_feature 1..21: note = siRNA sequence name:ETXS233
  modified_base 1: mod_base = OTHER; note = 2'O-methyl-cytidine
  modified_base 2: mod_base = OTHER; note = 2'O-methyl-uridine
  modified_base 3: mod_base = OTHER; note = 2'O-methyl-guanosine
  modified_base 4: mod_base = OTHER; note = 2'O-methyl-cytidine
  modified_base 5: mod_base = OTHER; note = 2'O-methyl-adenosine
  modified_base 6: mod_base = OTHER; note = 2'O-methyl-uridine
  modified_base 7: mod_base = OTHER; note = 2' Fluoro-cytidine
  modified_base 8: mod_base = OTHER; note = 2'O-methyl-uridine
  modified_base 9: mod_base = OTHER; note = 2'Fluoro-adenosine
  modified_base 10: mod_base = OTHER; note = 2' Fluoro-cytidine
  modified_base 11: mod_base = OTHER; note = 2' Fluoro-uridine
  modified_base 12: mod_base = OTHER; note = 2'O-methyl-uridine
  modified_base 13: mod_base = OTHER; note = 2'O-methyl-cytidine
  modified_base 14: mod_base = OTHER; note = 2'O-methyl-adenosine
  modified_base 15: mod_base = OTHER; note = 2'O-methyl-adenosine
  modified_base 16: mod_base = OTHER; note = 2'O-methyl-adenosine
  modified_base 17: mod_base = OTHER; note = 2'O-methyl-guanosine
  modified_base 18: mod_base = OTHER; note = 2'O-methyl-guanosine
  modified_base 19: mod_base = OTHER; note = 2'O-methyl-adenosine
  modified_base 20: mod_base = OTHER; note = 2'O-methyl-uridine
  modified_base 21: mod_base = OTHER; note = 2'O-methyl-cytidine
  modified_base 1..2: mod_base = OTHER; note = phosphorothioate linkage
  modified_base 2..3: mod_base = OTHER; note = phosphorothioate linkage
  modified_base 19..20: mod_base = OTHER; note = phosphorothioate linkage
  modified_base 20..21: mod_base = OTHER; note = phosphorothioate linkage
  source 1..21: mol_type = other RNA
ctgcatctacttcaaaggatc

SEQ ID NO: 564 - RNA, 21 nt, synthetic construct
  misc_feature 1..21: note = siRNA sequence name:ETXS235
  modified_base 1: mod_base = OTHER; note = 2'O-methyl-adenosine
  modified_base 2: mod_base = OTHER; note = 2'O-methyl-cytidine
  modified_base 3: mod_base = OTHER; note = 2'O-methyl-uridine
  modified_base 4: mod_base = OTHER; note = 2'O-methyl-guanosine
  modified_base 5: mod_base = OTHER; note = 2'O-methyl-cytidine
  modified_base 6: mod_base = OTHER; note = 2'O-methyl-adenosine
  modified_base 7: mod_base = OTHER; note = 2' Fluoro-uridine
  modified_base 8: mod_base = OTHER; note = 2'O-methyl-cytidine
  modified_base 9: mod_base = OTHER; note = 2' Fluoro-uridine
  modified_base 10: mod_base = OTHER; note = 2'Fluoro-adenosine
  modified_base 11: mod_base = OTHER; note = 2' Fluoro-cytidine
  modified_base 12: mod_base = OTHER; note = 2'O-methyl-uridine
  modified_base 13: mod_base = OTHER; note = 2'O-methyl-uridine
  modified_base 14: mod_base = OTHER; note = 2'O-methyl-cytidine
  modified_base 15: mod_base = OTHER; note = 2'O-methyl-adenosine
  modified_base 16: mod_base = OTHER; note = 2'O-methyl-adenosine
  modified_base 17: mod_base = OTHER; note = 2'O-methyl-adenosine
  modified_base 18: mod_base = OTHER; note = 2'O-methyl-guanosine
  modified_base 19: mod_base = OTHER; note = 2'O-methyl-guanosine
  modified_base 20: mod_base = OTHER; note = 2'O-methyl-adenosine
  modified_base 21: mod_base = OTHER; note = 2'O-methyl-uridine
  modified_base 1..2: mod_base = OTHER; note = phosphorothioate linkage
  modified_base 2..3: mod_base = OTHER; note = phosphorothioate linkage
  modified_base 19..20: mod_base = OTHER; note = phosphorothioate linkage
  modified_base 20..21: mod_base = OTHER; note = phosphorothioate linkage
  source 1..21: mol_type = other RNA
actgcatctacttcaaaggat

SEQ ID NO: 565 - RNA, 21 nt, synthetic construct
  misc_feature 1..21: note = siRNA sequence name:ETXS237
  modified_base 1: mod_base = OTHER; note = 2'O-methyl-guanosine
  modified_base 2: mod_base = OTHER; note = 2'O-methyl-guanosine
  modified_base 3: mod_base = OTHER; note = 2'O-methyl-guanosine
  modified_base 4: mod_base = OTHER; note = 2'O-methyl-adenosine
  modified_base 5: mod_base = OTHER; note = 2'O-methyl-guanosine
  modified_base 6: mod_base = OTHER; note = 2'O-methyl-adenosine
  modified_base 7: mod_base = OTHER; note = 2' Fluoro-guanosine
  modified_base 8: mod_base = OTHER; note = 2'O-methyl-adenosine
  modified_base 9: mod_base = OTHER; note = 2' Fluoro-cytidine
  modified_base 10: mod_base = OTHER; note = 2' Fluoro-cytidine
  modified_base 11: mod_base = OTHER; note = 2' Fluoro-cytidine
  modified_base 12: mod_base = OTHER; note = 2'O-methyl-adenosine
  modified_base 13: mod_base = OTHER; note = 2'O-methyl-uridine
  modified_base 14: mod_base = OTHER; note = 2'O-methyl-guanosine
  modified_base 15: mod_base = OTHER; note = 2'O-methyl-adenosine
  modified_base 16: mod_base = OTHER; note = 2'O-methyl-adenosine
  modified_base 17: mod_base = OTHER; note = 2'O-methyl-cytidine
  modified_base 18: mod_base = OTHER; note = 2'O-methyl-adenosine
  modified_base 19: mod_base = OTHER; note = 2'O-methyl-adenosine
  modified_base 20: mod_base = OTHER; note = 2'O-methyl-guanosine
  modified_base 21: mod_base = OTHER; note = 2'O-methyl-uridine
  modified_base 1..2: mod_base = OTHER; note = phosphorothioate linkage
  modified_base 2..3: mod_base = OTHER; note = phosphorothioate linkage
  modified_base 19..20: mod_base = OTHER; note = phosphorothioate linkage
  modified_base 20..21: mod_base = OTHER; note = phosphorothioate linkage
  source 1..21: mol_type = other RNA
gggagagacccatgaacaagt

SEQ ID NO: 566 - RNA, 21 nt, synthetic construct
  misc_feature 1..21: note = siRNA sequence name:ETXS239
  modified_base 1: mod_base = OTHER; note = 2'O-methyl-guanosine
  modified_base 2: mod_base = OTHER; note = 2'O-methyl-guanosine
  modified_base 3: mod_base = OTHER; note = 2'O-methyl-uridine
  modified_base 4: mod_base = OTHER; note = 2'O-methyl-guanosine
  modified_base 5: mod_base = OTHER; note = 2'O-methyl-adenosine
  modified_base 6: mod_base = OTHER; note = 2'O-methyl-adenosine
  modified_base 7: mod_base = OTHER; note = 2' Fluoro-uridine
  modified_base 8: mod_base = OTHER; note = 2'O-methyl-adenosine
  modified_base 9: mod_base = OTHER; note = 2'Fluoro-adenosine
  modified_base 10: mod_base = OTHER; note = 2'Fluoro-adenosine
  modified_base 11: mod_base = OTHER; note = 2' Fluoro-uridine
  modified_base 12: mod_base = OTHER; note = 2'O-methyl-uridine
  modified_base 13: mod_base = OTHER; note = 2'O-methyl-cytidine
  modified_base 14: mod_base = OTHER; note = 2'O-methyl-cytidine
  modified_base 15: mod_base = OTHER; note = 2'O-methyl-cytidine
  modified_base 16: mod_base = OTHER; note = 2'O-methyl-adenosine
  modified_base 17: mod_base = OTHER; note = 2'O-methyl-guanosine
  modified_base 18: mod_base = OTHER; note = 2'O-methyl-uridine
  modified_base 19: mod_base = OTHER; note = 2'O-methyl-guanosine
  modified_base 20: mod_base = OTHER; note = 2'O-methyl-guanosine
  modified_base 21: mod_base = OTHER; note = 2'O-methyl-adenosine
  modified_base 1..2: mod_base = OTHER; note = phosphorothioate linkage
  modified_base 2..3: mod_base = OTHER; note = phosphorothioate linkage
  modified_base 19..20: mod_base = OTHER; note = phosphorothioate linkage
  modified_base 20..21: mod_base = OTHER; note = phosphorothioate linkage
  source 1..21: mol_type = other RNA
ggtgaataaattcccagtgga

SEQ ID NO: 567 - RNA, 21 nt, synthetic construct
  misc_feature 1..21: note = siRNA sequence name:ETXS241
  modified_base 1: mod_base = OTHER; note = 2'O-methyl-uridine
  modified_base 2: mod_base = OTHER; note = 2'O-methyl-cytidine
  modified_base 3: mod_base = OTHER; note = 2'O-methyl-adenosine
  modified_base 4: mod_base = OTHER; note = 2'O-methyl-guanosine
  modified_base 5: mod_base = OTHER; note = 2'O-methyl-guanosine
  modified_base 6: mod_base = OTHER; note = 2'O-methyl-adenosine
  modified_base 7: mod_base = OTHER; note = 2' Fluoro-guanosine
  modified_base 8: mod_base = OTHER; note = 2'O-methyl-guanosine
  modified_base 9: mod_base = OTHER; note = 2'Fluoro-adenosine
  modified_base 10: mod_base = OTHER; note = 2'Fluoro-adenosine
  modified_base 11: mod_base = OTHER; note = 2' Fluoro-uridine
  modified_base 12: mod_base = OTHER; note = 2'O-methyl-uridine
  modified_base 13: mod_base = OTHER; note = 2'O-methyl-uridine
  modified_base 14: mod_base = OTHER; note = 2'O-methyl-uridine
  modified_base 15: mod_base = OTHER; note = 2'O-methyl-guanosine
  modified_base 16: mod_base = OTHER; note = 2'O-methyl-guanosine
  modified_base 17: mod_base = OTHER; note = 2'O-methyl-guanosine
  modified_base 18: mod_base = OTHER; note = 2'O-methyl-uridine
  modified_base 19: mod_base = OTHER; note = 2'O-methyl-adenosine
  modified_base 20: mod_base = OTHER; note = 2'O-methyl-cytidine
  modified_base 21: mod_base = OTHER; note = 2'O-methyl-adenosine
  modified_base 1..2: mod_base = OTHER; note = phosphorothioate linkage
  modified_base 2..3: mod_base = OTHER; note = phosphorothioate linkage
  modified_base 19..20: mod_base = OTHER; note = phosphorothioate linkage
  modified_base 20..21: mod_base = OTHER; note = phosphorothioate linkage
  source 1..21: mol_type = other RNA
tcaggaggaattttgggtaca

SEQ ID NO: 568 - RNA, 21 nt, synthetic construct
  misc_feature 1..21: note = siRNA sequence name:ETXS243
  modified_base 1: mod_base = OTHER; note = 2'O-methyl-guanosine
  modified_base 2: mod_base = OTHER; note = 2'O-methyl-cytidine
  modified_base 3: mod_base = OTHER; note = 2'O-methyl-uridine
  modified_base 4: mod_base = OTHER; note = 2'O-methyl-guanosine
  modified_base 5: mod_base = OTHER; note = 2'O-methyl-cytidine
  modified_base 6: mod_base = OTHER; note = 2'O-methyl-cytidine
  modified_base 7: mod_base = OTHER; note = 2' Fluoro-uridine
  modified_base 8: mod_base = OTHER; note = 2'O-methyl-guanosine
  modified_base 9: mod_base = OTHER; note = 2' Fluoro-cytidine
  modified_base 10: mod_base = OTHER; note = 2' Fluoro-uridine
  modified_base 11: mod_base = OTHER; note = 2' Fluoro-cytidine
  modified_base 12: mod_base = OTHER; note = 2'O-methyl-uridine
  modified_base 13: mod_base = OTHER; note = 2'O-methyl-uridine
  modified_base 14: mod_base = OTHER; note = 2'O-methyl-cytidine
  modified_base 15: mod_base = OTHER; note = 2'O-methyl-adenosine
  modified_base 16: mod_base = OTHER; note = 2'O-methyl-uridine
  modified_base 17: mod_base = OTHER; note = 2'O-methyl-guanosine
  modified_base 18: mod_base = OTHER; note = 2'O-methyl-guanosine
  modified_base 19: mod_base = OTHER; note = 2'O-methyl-guanosine
  modified_base 20: mod_base = OTHER; note = 2'O-methyl-adenosine
  modified_base 21: mod_base = OTHER; note = 2'O-methyl-adenosine
  modified_base 1..2: mod_base = OTHER; note = phosphorothioate linkage
  modified_base 2..3: mod_base = OTHER; note = phosphorothioate linkage
  modified_base 19..20: mod_base = OTHER; note = phosphorothioate linkage
  modified_base 20..21: mod_base = OTHER; note = phosphorothioate linkage
  source 1..21: mol_type = other RNA
gctgcctgctcttcatgggaa

SEQ ID NO: 569 - RNA, 21 nt, synthetic construct
  misc_feature 1..21: note = siRNA sequence name:ETXS245
  modified_base 1: mod_base = OTHER; note = 2'O-methyl-cytidine
  modified_base 2: mod_base = OTHER; note = 2'O-methyl-adenosine
  modified_base 3: mod_base = OTHER; note = 2'O-methyl-cytidine
  modified_base 4: mod_base = OTHER; note = 2'O-methyl-cytidine
  modified_base 5: mod_base = OTHER; note = 2'O-methyl-adenosine
  modified_base 6: mod_base = OTHER; note = 2'O-methyl-adenosine
  modified_base 7: mod_base = OTHER; note = 2' Fluoro-guanosine
  modified_base 8: mod_base = OTHER; note = 2'O-methyl-guanosine
  modified_base 9: mod_base = OTHER; note = 2' Fluoro-guanosine
  modified_base 10: mod_base = OTHER; note = 2' Fluoro-cytidine
  modified_base 11: mod_base = OTHER; note = 2' Fluoro-cytidine
  modified_base 12: mod_base = OTHER; note = 2'O-methyl-uridine
  modified_base 13: mod_base = OTHER; note = 2'O-methyl-cytidine
  modified_base 14: mod_base = OTHER; note = 2'O-methyl-adenosine
  modified_base 15: mod_base = OTHER; note = 2'O-methyl-uridine
  modified_base 16: mod_base = OTHER; note = 2'O-methyl-adenosine
  modified_base 17: mod_base = OTHER; note = 2'O-methyl-adenosine
  modified_base 18: mod_base = OTHER; note = 2'O-methyl-adenosine
  modified_base 19: mod_base = OTHER; note = 2'O-methyl-adenosine
  modified_base 20: mod_base = OTHER; note = 2'O-methyl-guanosine
  modified_base 21: mod_base = OTHER; note = 2'O-methyl-adenosine
  modified_base 1..2: mod_base = OTHER; note = phosphorothioate linkage
  modified_base 2..3: mod_base = OTHER; note = phosphorothioate linkage
  modified_base 19..20: mod_base = OTHER; note = phosphorothioate linkage
  modified_base 20..21: mod_base = OTHER; note = phosphorothioate linkage
  source 1..21: mol_type = other RNA
caccaagggcctcataaaaga

SEQ ID NO: 570 - RNA, 21 nt, synthetic construct
  misc_feature 1..21: note = siRNA sequence name:ETXS247
  modified_base 1: mod_base = OTHER; note = 2'O-methyl-cytidine
  modified_base 2: mod_base = OTHER; note = 2'O-methyl-cytidine
  modified_base 3: mod_base = OTHER; note = 2'O-methyl-uridine
  modified_base 4: mod_base = OTHER; note = 2'O-methyl-uridine
  modified_base 5: mod_base = OTHER; note = 2'O-methyl-uridine
  modified_base 6: mod_base = OTHER; note = 2'O-methyl-adenosine
  modified_base 7: mod_base = OTHER; note = 2' Fluoro-uridine
  modified_base 8: mod_base = OTHER; note = 2'O-methyl-adenosine
  modified_base 9: mod_base = OTHER; note = 2' Fluoro-uridine
  modified_base 10: mod_base = OTHER; note = 2' Fluoro-cytidine
  modified_base 11: mod_base = OTHER; note = 2' Fluoro-cytidine
  modified_base 12: mod_base = OTHER; note = 2'O-methyl-adenosine
  modified_base 13: mod_base = OTHER; note = 2'O-methyl-guanosine
  modified_base 14: mod_base = OTHER; note = 2'O-methyl-adenosine
  modified_base 15: mod_base = OTHER; note = 2'O-methyl-adenosine
  modified_base 16: mod_base = OTHER; note = 2'O-methyl-guanosine
  modified_base 17: mod_base = OTHER; note = 2'O-methyl-cytidine
  modified_base 18: mod_base = OTHER; note = 2'O-methyl-adenosine
  modified_base 19: mod_base = OTHER; note = 2'O-methyl-guanosine
  modified_base 20: mod_base = OTHER; note = 2'O-methyl-uridine
  modified_base 21: mod_base = OTHER; note = 2'O-methyl-uridine
  modified_base 1..2: mod_base = OTHER; note = phosphorothioate linkage
  modified_base 2..3: mod_base = OTHER; note = phosphorothioate linkage
  modified_base 19..20: mod_base = OTHER; note = phosphorothioate linkage
  modified_base 20..21: mod_base = OTHER; note = phosphorothioate linkage
  source 1..21: mol_type = other RNA
cctttatatccagaagcagtt

SEQ ID NO: 571 - RNA, 21 nt, synthetic construct
  misc_feature 1..21: note = siRNA sequence name:ETXS249
  modified_base 1: mod_base = OTHER; note = 2'O-methyl-cytidine
  modified_base 2: mod_base = OTHER; note = 2'O-methyl-adenosine
  modified_base 3: mod_base = OTHER; note = 2'O-methyl-adenosine
  modified_base 4: mod_base = OTHER; note = 2'O-methyl-cytidine
  modified_base 5: mod_base = OTHER; note = 2'O-methyl-uridine
  modified_base 6: mod_base = OTHER; note = 2'O-methyl-guanosine
  modified_base 7: mod_base = OTHER; note = 2' Fluoro-cytidine
  modified_base 8: mod_base = OTHER; note = 2'O-methyl-adenosine
  modified_base 9: mod_base = OTHER; note = 2' Fluoro-uridine
  modified_base 10: mod_base = OTHER; note = 2' Fluoro-cytidine
  modified_base 11: mod_base = OTHER; note = 2' Fluoro-uridine
  modified_base 12: mod_base = OTHER; note = 2'O-methyl-adenosine
  modified_base 13: mod_base = OTHER; note = 2'O-methyl-cytidine
  modified_base 14: mod_base = OTHER; note = 2'O-methyl-uridine
  modified_base 15: mod_base = OTHER; note = 2'O-methyl-uridine
  modified_base 16: mod_base = OTHER; note = 2'O-methyl-cytidine
  modified_base 17: mod_base = OTHER; note = 2'O-methyl-adenosine
  modified_base 18: mod_base = OTHER; note = 2'O-methyl-adenosine
  modified_base 19: mod_base = OTHER; note = 2'O-methyl-adenosine
  modified_base 20: mod_base = OTHER; note = 2'O-methyl-guanosine
  modified_base 21: mod_base = OTHER; note = 2'O-methyl-guanosine
  modified_base 1..2: mod_base = OTHER; note = phosphorothioate linkage
  modified_base 2..3: mod_base = OTHER; note = phosphorothioate linkage
  modified_base 19..20: mod_base = OTHER; note = phosphorothioate linkage
  modified_base 20..21: mod_base = OTHER; note = phosphorothioate linkage
  source 1..21: mol_type = other RNA
caactgcatctacttcaaagg

SEQ ID NO: 572 - RNA, 21 nt, synthetic construct
  misc_feature 1..21: note = siRNA sequence name:ETXS251
  modified_base 1: mod_base = OTHER; note = 2'O-methyl-guanosine
  modified_base 2: mod_base = OTHER; note = 2'O-methyl-adenosine
  modified_base 3: mod_base = OTHER; note = 2'O-methyl-guanosine
  modified_base 4: mod_base = OTHER; note = 2'O-methyl-cytidine
  modified_base 5: mod_base = OTHER; note = 2'O-methyl-cytidine
  modified_base 6: mod_base = OTHER; note = 2'O-methyl-guanosine
  modified_base 7: mod_base = OTHER; note = 2' Fluoro-guanosine
  modified_base 8: mod_base = OTHER; note = 2'O-methyl-adenosine
  modified_base 9: mod_base = OTHER; note = 2' Fluoro-uridine
  modified_base 10: mod_base = OTHER; note = 2' Fluoro-cytidine
  modified_base 11: mod_base = OTHER; note = 2' Fluoro-cytidine
  modified_base 12: mod_base = OTHER; note = 2'O-methyl-adenosine
  modified_base 13: mod_base = OTHER; note = 2'O-methyl-guanosine
  modified_base 14: mod_base = OTHER; note = 2'O-methyl-cytidine
  modified_base 15: mod_base = OTHER; note = 2'O-methyl-guanosine
  modified_base 16: mod_base = OTHER; note = 2'O-methyl-uridine
  modified_base 17: mod_base = OTHER; note = 2'O-methyl-cytidine
  modified_base 18: mod_base = OTHER; note = 2'O-methyl-uridine
  modified_base 19: mod_base = OTHER; note = 2'O-methyl-uridine
  modified_base 20: mod_base = OTHER; note = 2'O-methyl-adenosine
  modified_base 21: mod_base = OTHER; note = 2'O-methyl-adenosine
  modified_base 1..2: mod_base = OTHER; note = phosphorothioate linkage
  modified_base 2..3: mod_base = OTHER; note = phosphorothioate linkage
  modified_base 19..20: mod_base = OTHER; note = phosphorothioate linkage
  modified_base 20..21: mod_base = OTHER; note = phosphorothioate linkage
  source 1..21: mol_type = other RNA
gagccggatccagcgtcttaa

SEQ ID NO: 573 - RNA, 21 nt, synthetic construct
  misc_feature 1..21: note = siRNA sequence name:ETXS253
  modified_base 1: mod_base = OTHER; note = 2'O-methyl-adenosine
  modified_base 2: mod_base = OTHER; note = 2'O-methyl-uridine
  modified_base 3: mod_base = OTHER; note = 2'O-methyl-cytidine
  modified_base 4: mod_base = OTHER; note = 2'O-methyl-cytidine
  modified_base 5: mod_base = OTHER; note = 2'O-methyl-adenosine
  modified_base 6: mod_base = OTHER; note = 2'O-methyl-guanosine
  modified_base 7: mod_base = OTHER; note = 2' Fluoro-cytidine
  modified_base 8: mod_base = OTHER; note = 2'O-methyl-guanosine
  modified_base 9: mod_base = OTHER; note = 2' Fluoro-uridine
  modified_base 10: mod_base = OTHER; note = 2' Fluoro-cytidine
  modified_base 11: mod_base = OTHER; note = 2' Fluoro-uridine
  modified_base 12: mod_base = OTHER; note = 2'O-methyl-uridine
  modified_base 13: mod_base = OTHER; note = 2'O-methyl-adenosine
  modified_base 14: mod_base = OTHER; note = 2'O-methyl-adenosine
  modified_base 15: mod_base = OTHER; note = 2'O-methyl-cytidine
  modified_base 16: mod_base = OTHER; note = 2'O-methyl-adenosine
  modified_base 17: mod_base = OTHER; note = 2'O-methyl-uridine
  modified_base 18: mod_base = OTHER; note = 2'O-methyl-cytidine
  modified_base 19: mod_base = OTHER; note = 2'O-methyl-cytidine
  modified_base 20: mod_base = OTHER; note = 2'O-methyl-uridine
  modified_base 21: mod_base = OTHER; note = 2'O-methyl-cytidine
  modified_base 1..2: mod_base = OTHER; note = phosphorothioate linkage
  modified_base 2..3: mod_base = OTHER; note = phosphorothioate linkage
  modified_base 19..20: mod_base = OTHER; note = phosphorothioate linkage
  modified_base 20..21: mod_base = OTHER; note = phosphorothioate linkage
  source 1..21: mol_type = other RNA
atccagcgtcttaacatcctc

SEQ ID NO: 574 - RNA, 21 nt, synthetic construct
  misc_feature 1..21: note = siRNA sequence name:ETXS255
  modified_base 1: mod_base = OTHER; note = 2'O-methyl-cytidine
  modified_base 2: mod_base = OTHER; note = 2'O-methyl-adenosine
  modified_base 3: mod_base = OTHER; note = 2'O-methyl-adenosine
  modified_base 4: mod_base = OTHER; note = 2'O-methyl-adenosine
  modified_base 5: mod_base = OTHER; note = 2'O-methyl-adenosine
  modified_base 6: mod_base = OTHER; note = 2'O-methyl-adenosine
  modified_base 7: mod_base = OTHER; note = 2'Fluoro-adenosine
  modified_base 8: mod_base = OTHER; note = 2'O-methyl-guanosine
  modified_base 9: mod_base = OTHER; note = 2' Fluoro-cytidine
  modified_base 10: mod_base = OTHER; note = 2'Fluoro-adenosine
  modified_base 11: mod_base = OTHER; note = 2' Fluoro-uridine
  modified_base 12: mod_base = OTHER; note = 2'O-methyl-guanosine
  modified_base 13: mod_base = OTHER; note = 2'O-methyl-adenosine
  modified_base 14: mod_base = OTHER; note = 2'O-methyl-cytidine
  modified_base 15: mod_base = OTHER; note = 2'O-methyl-adenosine
  modified_base 16: mod_base = OTHER; note = 2'O-methyl-adenosine
  modified_base 17: mod_base = OTHER; note = 2'O-methyl-adenosine
  modified_base 18: mod_base = OTHER; note = 2'O-methyl-cytidine
  modified_base 19: mod_base = OTHER; note = 2'O-methyl-adenosine
  modified_base 20: mod_base = OTHER; note = 2'O-methyl-guanosine
  modified_base 21: mod_base = OTHER; note = 2'O-methyl-adenosine
  modified_base 1..2: mod_base = OTHER; note = phosphorothioate linkage
  modified_base 2..3: mod_base = OTHER; note = phosphorothioate linkage
  modified_base 19..20: mod_base = OTHER; note = phosphorothioate linkage
  modified_base 20..21: mod_base = OTHER; note = phosphorothioate linkage
  source 1..21: mol_type = other RNA
caaaaaagcatgacaaacaga

SEQ ID NO: 575 - RNA, 21 nt, synthetic construct
  misc_feature 1..21: note = siRNA sequence name:ETXS257
  modified_base 1: mod_base = OTHER; note = 2'O-methyl-cytidine
  modified_base 2: mod_base = OTHER; note = 2'O-methyl-adenosine
  modified_base 3: mod_base = OTHER; note = 2'O-methyl-guanosine
  modified_base 4: mod_base = OTHER; note = 2'O-methyl-guanosine
  modified_base 5: mod_base = OTHER; note = 2'O-methyl-adenosine
  modified_base 6: mod_base = OTHER; note = 2'O-methyl-guanosine
  modified_base 7: mod_base = OTHER; note = 2' Fluoro-guanosine
  modified_base 8: mod_base = OTHER; note = 2'O-methyl-adenosine
  modified_base 9: mod_base = OTHER; note = 2'Fluoro-adenosine
  modified_base 10: mod_base = OTHER; note = 2' Fluoro-uridine
  modified_base 11: mod_base = OTHER; note = 2' Fluoro-uridine
  modified_base 12: mod_base = OTHER; note = 2'O-methyl-uridine
  modified_base 13: mod_base = OTHER; note = 2'O-methyl-uridine
  modified_base 14: mod_base = OTHER; note = 2'O-methyl-guanosine
  modified_base 15: mod_base = OTHER; note = 2'O-methyl-guanosine
  modified_base 16: mod_base = OTHER; note = 2'O-methyl-guanosine
  modified_base 17: mod_base = OTHER; note = 2'O-methyl-uridine
  modified_base 18: mod_base = OTHER; note = 2'O-methyl-adenosine
  modified_base 19: mod_base = OTHER; note = 2'O-methyl-cytidine
  modified_base 20: mod_base = OTHER; note = 2'O-methyl-adenosine
  modified_base 21: mod_base = OTHER; note = 2'O-methyl-cytidine
  modified_base 1..2: mod_base = OTHER; note = phosphorothioate linkage
  modified_base 2..3: mod_base = OTHER; note = phosphorothioate linkage
  modified_base 19..20: mod_base = OTHER; note = phosphorothioate linkage
  modified_base 20..21: mod_base = OTHER; note = phosphorothioate linkage
  source 1..21: mol_type = other RNA
caggaggaattttgggtacac

SEQ ID NO: 576 - RNA, 21 nt, synthetic construct
  misc_feature 1..21: note = siRNA sequence name:ETXS259
  modified_base 1: mod_base = OTHER; note = 2'O-methyl-cytidine
  modified_base 2: mod_base = OTHER; note = 2'O-methyl-adenosine
  modified_base 3: mod_base = OTHER; note = 2'O-methyl-adenosine
  modified_base 4: mod_base = OTHER; note = 2'O-methyl-cytidine
  modified_base 5: mod_base = OTHER; note = 2'O-methyl-cytidine
  modified_base 6: mod_base = OTHER; note = 2'O-methyl-adenosine
  modified_base 7: mod_base = OTHER; note = 2' Fluoro-cytidine
  modified_base 8: mod_base = OTHER; note = 2'O-methyl-adenosine
  modified_base 9: mod_base = OTHER; note = 2'Fluoro-adenosine
  modified_base 10: mod_base = OTHER; note = 2' Fluoro-cytidine
  modified_base 11: mod_base = OTHER; note = 2' Fluoro-uridine
  modified_base 12: mod_base = OTHER; note = 2'O-methyl-uridine
  modified_base 13: mod_base = OTHER; note = 2'O-methyl-cytidine
  modified_base 14: mod_base = OTHER; note = 2'O-methyl-cytidine
  modified_base 15: mod_base = OTHER; note = 2'O-methyl-guanosine
  modified_base 16: mod_base = OTHER; note = 2'O-methyl-guanosine
  modified_base 17: mod_base = OTHER; note = 2'O-methyl-cytidine
  modified_base 18: mod_base = OTHER; note = 2'O-methyl-uridine
  modified_base 19: mod_base = OTHER; note = 2'O-methyl-guanosine
  modified_base 20: mod_base = OTHER; note = 2'O-methyl-adenosine
  modified_base 21: mod_base = OTHER; note = 2'O-methyl-adenosine
  modified_base 1..2: mod_base = OTHER; note = phosphorothioate linkage
  modified_base 2..3: mod_base = OTHER; note = phosphorothioate linkage
  modified_base 19..20: mod_base = OTHER; note = phosphorothioate linkage
  modified_base 20..21: mod_base = OTHER; note = phosphorothioate linkage
  source 1..21: mol_type = other RNA
caaccacaacttccggctgaa

SEQ ID NO: 577 - RNA, 21 nt, synthetic construct
  misc_feature 1..21: note = siRNA sequence name:ETXS261
  modified_base 1: mod_base = OTHER; note = 2'O-methyl-guanosine
  modified_base 2: mod_base = OTHER; note = 2'O-methyl-guanosine
  modified_base 3: mod_base = OTHER; note = 2'O-methyl-cytidine
  modified_base 4: mod_base = OTHER; note = 2'O-methyl-adenosine
  modified_base 5: mod_base = OTHER; note = 2'O-methyl-adenosine
  modified_base 6: mod_base = OTHER; note = 2'O-methyl-adenosine
  modified_base 7: mod_base = OTHER; note = 2'Fluoro-adenosine
  modified_base 8: mod_base = OTHER; note = 2'O-methyl-adenosine
  modified_base 9: mod_base = OTHER; note = 2'Fluoro-adenosine
  modified_base 10: mod_base = OTHER; note = 2' Fluoro-guanosine
  modified_base 11: mod_base = OTHER; note = 2' Fluoro-cytidine
  modified_base 12: mod_base = OTHER; note = 2'O-methyl-adenosine
  modified_base 13: mod_base = OTHER; note = 2'O-methyl-uridine
  modified_base 14: mod_base = OTHER; note = 2'O-methyl-guanosine
  modified_base 15: mod_base = OTHER; note = 2'O-methyl-adenosine
  modified_base 16: mod_base = OTHER; note = 2'O-methyl-cytidine
  modified_base 17: mod_base = OTHER; note = 2'O-methyl-adenosine
  modified_base 18: mod_base = OTHER; note = 2'O-methyl-adenosine
  modified_base 19: mod_base = OTHER; note = 2'O-methyl-adenosine
  modified_base 20: mod_base = OTHER; note = 2'O-methyl-cytidine
  modified_base 21: mod_base = OTHER; note = 2'O-methyl-adenosine
  modified_base 1..2: mod_base = OTHER; note = phosphorothioate linkage
  modified_base 2..3: mod_base = OTHER; note = phosphorothioate linkage
  modified_base 19..20: mod_base = OTHER; note = phosphorothioate linkage
  modified_base 20..21: mod_base = OTHER; note = phosphorothioate linkage
  source 1..21: mol_type = other RNA
ggcaaaaaagcatgacaaaca

SEQ ID NO: 578 - RNA, 21 nt, synthetic construct
  misc_feature 1..21: note = siRNA sequence name:ETXS263
  modified_base 1: mod_base = OTHER; note = 2'O-methyl-guanosine
  modified_base 2: mod_base = OTHER; note = 2'O-methyl-adenosine
  modified_base 3: mod_base = OTHER; note = 2'O-methyl-adenosine
  modified_base 4: mod_base = OTHER; note = 2'O-methyl-uridine
  modified_base 5: mod_base = OTHER; note = 2'O-methyl-adenosine
  modified_base 6: mod_base = OTHER; note = 2'O-methyl-adenosine
  modified_base 7: mod_base = OTHER; note = 2'Fluoro-adenosine
  modified_base 8: mod_base = OTHER; note = 2'O-methyl-uridine
  modified_base 9: mod_base = OTHER; note = 2' Fluoro-uridine
  modified_base 10: mod_base = OTHER; note = 2' Fluoro-cytidine
  modified_base 11: mod_base = OTHER; note = 2' Fluoro-cytidine
  modified_base 12: mod_base = OTHER; note = 2'O-methyl-cytidine
  modified_base 13: mod_base = OTHER; note = 2'O-methyl-adenosine
  modified_base 14: mod_base = OTHER; note = 2'O-methyl-guanosine
  modified_base 15: mod_base = OTHER; note = 2'O-methyl-uridine
  modified_base 16: mod_base = OTHER; note = 2'O-methyl-guanosine
  modified_base 17: mod_base = OTHER; note = 2'O-methyl-guanosine
  modified_base 18: mod_base = OTHER; note = 2'O-methyl-adenosine
  modified_base 19: mod_base = OTHER; note = 2'O-methyl-adenosine
  modified_base 20: mod_base = OTHER; note = 2'O-methyl-adenosine
  modified_base 21: mod_base = OTHER; note = 2'O-methyl-uridine
  modified_base 1..2: mod_base = OTHER; note = phosphorothioate linkage
  modified_base 2..3: mod_base = OTHER; note = phosphorothioate linkage
  modified_base 19..20: mod_base = OTHER; note = phosphorothioate linkage
  modified_base 20..21: mod_base = OTHER; note = phosphorothioate linkage
  source 1..21: mol_type = other RNA
gaataaattcccagtggaaat

SEQ ID NO: 579 - RNA, 21 nt, synthetic construct
  misc_feature 1..21: note = siRNA sequence name:ETXS265
  modified_base 1: mod_base = OTHER; note = 2'O-methyl-guanosine
  modified_base 2: mod_base = OTHER; note = 2'O-methyl-guanosine
  modified_base 3: mod_base = OTHER; note = 2'O-methyl-guanosine
  modified_base 4: mod_base = OTHER; note = 2'O-methyl-cytidine
  modified_base 5: mod_base = OTHER; note = 2'O-methyl-adenosine
  modified_base 6: mod_base = OTHER; note = 2'O-methyl-uridine
  modified_base 7: mod_base = OTHER; note = 2' Fluoro-cytidine
  modified_base 8: mod_base = OTHER; note = 2'O-methyl-adenosine
  modified_base 9: mod_base = OTHER; note = 2' Fluoro-guanosine
  modified_base 10: mod_base = OTHER; note = 2' Fluoro-cytidine
  modified_base 11: mod_base = OTHER; note = 2'Fluoro-adenosine
  modified_base 12: mod_base = OTHER; note = 2'O-methyl-uridine
  modified_base 13: mod_base = OTHER; note = 2'O-methyl-guanosine
  modified_base 14: mod_base = OTHER; note = 2'O-methyl-cytidine
  modified_base 15: mod_base = OTHER; note = 2'O-methyl-uridine
  modified_base 16: mod_base = OTHER; note = 2'O-methyl-adenosine
  modified_base 17: mod_base = OTHER; note = 2'O-methyl-adenosine
  modified_base 18: mod_base = OTHER; note = 2'O-methyl-uridine
  modified_base 19: mod_base = OTHER; note = 2'O-methyl-uridine
  modified_base 20: mod_base = OTHER; note = 2'O-methyl-guanosine
  modified_base 21: mod_base = OTHER; note = 2'O-methyl-uridine
  modified_base 1..2: mod_base = OTHER; note = phosphorothioate linkage
  modified_base 2..3: mod_base = OTHER; note = phosphorothioate linkage
  modified_base 19..20: mod_base = OTHER; note = phosphorothioate linkage
  modified_base 20..21: mod_base = OTHER; note = phosphorothioate linkage
  source 1..21: mol_type = other RNA
gggcatcagcatgctaattgt

SEQ ID NO: 580 - RNA, 21 nt, synthetic construct
  misc_feature 1..21: note = siRNA sequence name:ETXS267
  modified_base 1: mod_base = OTHER; note = 2'O-methyl-adenosine
  modified_base 2: mod_base = OTHER; note = 2'O-methyl-adenosine
  modified_base 3: mod_base = OTHER; note = 2'O-methyl-adenosine
  modified_base 4: mod_base = OTHER; note = 2'O-methyl-adenosine
  modified_base 5: mod_base = OTHER; note = 2'O-methyl-adenosine
  modified_base 6: mod_base = OTHER; note = 2'O-methyl-guanosine
  modified_base 7: mod_base = OTHER; note = 2' Fluoro-cytidine
  modified_base 8: mod_base = OTHER; note = 2'O-methyl-adenosine
  modified_base 9: mod_base = OTHER; note = 2' Fluoro-uridine
  modified_base 10: mod_base = OTHER; note = 2' Fluoro-guanosine
  modified_base 11: mod_base = OTHER; note = 2'Fluoro-adenosine
  modified_base 12: mod_base = OTHER; note = 2'O-methyl-cytidine
  modified_base 13: mod_base = OTHER; note = 2'O-methyl-adenosine
  modified_base 14: mod_base = OTHER; note = 2'O-methyl-adenosine
  modified_base 15: mod_base = OTHER; note = 2'O-methyl-adenosine
  modified_base 16: mod_base = OTHER; note = 2'O-methyl-cytidine
  modified_base 17: mod_base = OTHER; note = 2'O-methyl-adenosine
  modified_base 18: mod_base = OTHER; note = 2'O-methyl-guanosine
  modified_base 19: mod_base = OTHER; note = 2'O-methyl-adenosine
  modified_base 20: mod_base = OTHER; note = 2'O-methyl-adenosine
  modified_base 21: mod_base = OTHER; note = 2'O-methyl-cytidine
  modified_base 1..2: mod_base = OTHER; note = phosphorothioate linkage
  modified_base 2..3: mod_base = OTHER; note = phosphorothioate linkage
  modified_base 19..20: mod_base = OTHER; note = phosphorothioate linkage
  modified_base 20..21: mod_base = OTHER; note = phosphorothioate linkage
  source 1..21: mol_type = other RNA
aaaaagcatgacaaacagaac

SEQ ID NO: 581 - RNA, 21 nt, synthetic construct
  misc_feature 1..21: note = siRNA sequence name:ETXS269
  modified_base 1: mod_base = OTHER; note = 2'O-methyl-guanosine
  modified_base 2: mod_base = OTHER; note = 2'O-methyl-adenosine
  modified_base 3: mod_base = OTHER; note = 2'O-methyl-guanosine
  modified_base 4: mod_base = OTHER; note = 2'O-methyl-uridine
  modified_base 5: mod_base = OTHER; note = 2'O-methyl-adenosine
  modified_base 6: mod_base = OTHER; note = 2'O-methyl-uridine
  modified_base 7: mod_base = OTHER; note = 2' Fluoro-uridine
  modified_base 8: mod_base = OTHER; note = 2'O-methyl-adenosine
  modified_base 9: mod_base = OTHER; note = 2' Fluoro-cytidine
  modified_base 10: mod_base = OTHER; note = 2' Fluoro-uridine
  modified_base 11: mod_base = OTHER; note = 2' Fluoro-uridine
  modified_base 12: mod_base = OTHER; note = 2'O-methyl-uridine
  modified_base 13: mod_base = OTHER; note = 2'O-methyl-guanosine
  modified_base 14: mod_base = OTHER; note = 2'O-methyl-cytidine
  modified_base 15: mod_base = OTHER; note = 2'O-methyl-uridine
  modified_base 16: mod_base = OTHER; note = 2'O-methyl-guanosine
  modified_base 17: mod_base = OTHER; note = 2'O-methyl-adenosine
  modified_base 18: mod_base = OTHER; note = 2'O-methyl-guanosine
  modified_base 19: mod_base = OTHER; note = 2'O-methyl-guanosine
  modified_base 20: mod_base = OTHER; note = 2'O-methyl-cytidine
  modified_base 21: mod_base = OTHER; note = 2'O-methyl-cytidine
  modified_base 1..2: mod_base = OTHER; note = phosphorothioate linkage
  modified_base 2..3: mod_base = OTHER; note = phosphorothioate linkage
  modified_base 19..20: mod_base = OTHER; note = phosphorothioate linkage
  modified_base 20..21: mod_base = OTHER; note = phosphorothioate linkage
  source 1..21: mol_type = other RNA
gagtattactttgctgaggcc

SEQ ID NO: 582 - RNA, 21 nt, synthetic construct
  misc_feature 1..21: note = siRNA sequence name:ETXS271
  modified_base 1: mod_base = OTHER; note = 2'O-methyl-uridine
  modified_base 2: mod_base = OTHER; note = 2'O-methyl-cytidine
  modified_base 3: mod_base = OTHER; note = 2'O-methyl-cytidine
  modified_base 4: mod_base = OTHER; note = 2'O-methyl-uridine
  modified_base 5: mod_base = OTHER; note = 2'O-methyl-uridine
  modified_base 6: mod_base = OTHER; note = 2'O-methyl-adenosine
  modified_base 7: mod_base = OTHER; note = 2' Fluoro-guanosine
  modified_base 8: mod_base = OTHER; note = 2'O-methyl-guanosine
  modified_base 9: mod_base = OTHER; note = 2' Fluoro-uridine
  modified_base 10: mod_base = OTHER; note = 2' Fluoro-cytidine
  modified_base 11: mod_base = OTHER; note = 2' Fluoro-uridine
  modified_base 12: mod_base = OTHER; note = 2'O-methyl-guanosine
  modified_base 13: mod_base = OTHER; note = 2'O-methyl-adenosine
  modified_base 14: mod_base = OTHER; note = 2'O-methyl-adenosine
  modified_base 15: mod_base = OTHER; note = 2'O-methyl-guanosine
  modified_base 16: mod_base = OTHER; note = 2'O-methyl-guanosine
  modified_base 17: mod_base = OTHER; note = 2'O-methyl-guanosine
  modified_base 18: mod_base = OTHER; note = 2'O-methyl-adenosine
  modified_base 19: mod_base = OTHER; note = 2'O-methyl-guanosine
  modified_base 20: mod_base = OTHER; note = 2'O-methyl-adenosine
  modified_base 21: mod_base = OTHER; note = 2'O-methyl-guanosine
  modified_base 1..2: mod_base = OTHER; note = phosphorothioate linkage
  modified_base 2..3: mod_base = OTHER; note = phosphorothioate linkage
  modified_base 19..20: mod_base = OTHER; note = phosphorothioate linkage
  modified_base 20..21: mod_base = OTHER; note = phosphorothioate linkage
  source 1..21: mol_type = other RNA
tccttaggtctgaagggagag

SEQ ID NO: 583 - RNA, 21 nt, synthetic construct
  misc_feature 1..21: note = siRNA sequence name:ETXS273
  modified_base 1: mod_base = OTHER; note = 2'O-methyl-cytidine
  modified_base 2: mod_base = OTHER; note = 2'O-methyl-adenosine
  modified_base 3: mod_base = OTHER; note = 2'O-methyl-uridine
  modified_base 4: mod_base = OTHER; note = 2'O-methyl-cytidine
  modified_base 5: mod_base = OTHER; note = 2'O-methyl-guanosine
  modified_base 6: mod_base = OTHER; note = 2'O-methyl-adenosine
  modified_base 7: mod_base = OTHER; note = 2' Fluoro-cytidine
  modified_base 8: mod_base = OTHER; note = 2'O-methyl-cytidine
  modified_base 9: mod_base = OTHER; note = 2' Fluoro-uridine
  modified_base 10: mod_base = OTHER; note = 2' Fluoro-guanosine
  modified_base 11: mod_base = OTHER; note = 2' Fluoro-uridine
  modified_base 12: mod_base = OTHER; note = 2'O-methyl-uridine
  modified_base 13: mod_base = OTHER; note = 2'O-methyl-cytidine
  modified_base 14: mod_base = OTHER; note = 2'O-methyl-adenosine
  modified_base 15: mod_base = OTHER; note = 2'O-methyl-adenosine
  modified_base 16: mod_base = OTHER; note = 2'O-methyl-guanosine
  modified_base 17: mod_base = OTHER; note = 2'O-methyl-cytidine
  modified_base 18: mod_base = OTHER; note = 2'O-methyl-adenosine
  modified_base 19: mod_base = OTHER; note = 2'O-methyl-cytidine
  modified_base 20: mod_base = OTHER; note = 2'O-methyl-cytidine
  modified_base 21: mod_base = OTHER; note = 2'O-methyl-adenosine
  modified_base 1..2: mod_base = OTHER; note = phosphorothioate linkage
  modified_base 2..3: mod_base = OTHER; note = phosphorothioate linkage
  modified_base 19..20: mod_base = OTHER; note = phosphorothioate linkage
  modified_base 20..21: mod_base = OTHER; note = phosphorothioate linkage
  source 1..21: mol_type = other RNA
catcgacctgttcaagcacca

SEQ ID NO: 584 - RNA, 21 nt, synthetic construct
  misc_feature 1..21: note = siRNA sequence name:ETXS275
  modified_base 1: mod_base = OTHER; note = 2'O-methyl-uridine
  modified_base 2: mod_base = OTHER; note = 2'O-methyl-cytidine
  modified_base 3: mod_base = OTHER; note = 2'O-methyl-adenosine
  modified_base 4: mod_base = OTHER; note = 2'O-methyl-cytidine
  modified_base 5: mod_base = OTHER; note = 2'O-methyl-cytidine
  modified_base 6: mod_base = OTHER; note = 2'O-methyl-adenosine
  modified_base 7: mod_base = OTHER; note = 2'Fluoro-adenosine
  modified_base 8: mod_base = OTHER; note = 2'O-methyl-guanosine
  modified_base 9: mod_base = OTHER; note = 2' Fluoro-guanosine
  modified_base 10: mod_base = OTHER; note = 2' Fluoro-guanosine
  modified_base 11: mod_base = OTHER; note = 2' Fluoro-cytidine
  modified_base 12: mod_base = OTHER; note = 2'O-methyl-cytidine
  modified_base 13: mod_base = OTHER; note = 2'O-methyl-uridine
  modified_base 14: mod_base = OTHER; note = 2'O-methyl-cytidine
  modified_base 15: mod_base = OTHER; note = 2'O-methyl-adenosine
  modified_base 16: mod_base = OTHER; note = 2'O-methyl-uridine
  modified_base 17: mod_base = OTHER; note = 2'O-methyl-adenosine
  modified_base 18: mod_base = OTHER; note = 2'O-methyl-adenosine
  modified_base 19: mod_base = OTHER; note = 2'O-methyl-adenosine
  modified_base 20: mod_base = OTHER; note = 2'O-methyl-adenosine
  modified_base 21: mod_base = OTHER; note = 2'O-methyl-guanosine
  modified_base 1..2: mod_base = OTHER; note = phosphorothioate linkage
  modified_base 2..3: mod_base = OTHER; note = phosphorothioate linkage
  modified_base 19..20: mod_base = OTHER; note = phosphorothioate linkage
  modified_base 20..21: mod_base = OTHER; note = phosphorothioate linkage
  source 1..21: mol_type = other RNA
tcaccaagggcctcataaaag

SEQ ID NO: 585 - RNA, 21 nt, synthetic construct
  misc_feature 1..21: note = siRNA sequence name:ETXS277
  modified_base 1: mod_base = OTHER; note = 2'O-methyl-adenosine
  modified_base 2: mod_base = OTHER; note = 2'O-methyl-adenosine
  modified_base 3: mod_base = OTHER; note = 2'O-methyl-uridine
  modified_base 4: mod_base = OTHER; note = 2'O-methyl-adenosine
  modified_base 5: mod_base = OTHER; note = 2'O-methyl-adenosine
  modified_base 6: mod_base = OTHER; note = 2'O-methyl-adenosine
  modified_base 7: mod_base = OTHER; note = 2' Fluoro-uridine
  modified_base 8: mod_base = OTHER; note = 2'O-methyl-uridine
  modified_base 9: mod_base = OTHER; note = 2' Fluoro-cytidine
  modified_base 10: mod_base = OTHER; note = 2' Fluoro-cytidine
  modified_base 11: mod_base = OTHER; note = 2' Fluoro-cytidine
  modified_base 12: mod_base = OTHER; note = 2'O-methyl-adenosine
  modified_base 13: mod_base = OTHER; note = 2'O-methyl-guanosine
  modified_base 14: mod_base = OTHER; note = 2'O-methyl-uridine
  modified_base 15: mod_base = OTHER; note = 2'O-methyl-guanosine
  modified_base 16: mod_base = OTHER; note = 2'O-methyl-guanosine
  modified_base 17: mod_base = OTHER; note = 2'O-methyl-adenosine
  modified_base 18: mod_base = OTHER; note = 2'O-methyl-adenosine
  modified_base 19: mod_base = OTHER; note = 2'O-methyl-adenosine
  modified_base 20: mod_base = OTHER; note = 2'O-methyl-uridine
  modified_base 21: mod_base = OTHER; note = 2'O-methyl-guanosine
  modified_base 1..2: mod_base = OTHER; note = phosphorothioate linkage
  modified_base 2..3: mod_base = OTHER; note = phosphorothioate linkage
  modified_base 19..20: mod_base = OTHER; note = phosphorothioate linkage
  modified_base 20..21: mod_base = OTHER; note = phosphorothioate linkage
  source 1..21: mol_type = other RNA
aataaattcccagtggaaatg

SEQ ID NO: 586 - RNA, 21 nt, synthetic construct
  misc_feature 1..21: note = siRNA sequence name:ETXS279
  modified_base 1: mod_base = OTHER; note = 2'O-methyl-guanosine
  modified_base 2: mod_base = OTHER; note = 2'O-methyl-cytidine
  modified_base 3: mod_base = OTHER; note = 2'O-methyl-adenosine
  modified_base 4: mod_base = OTHER; note = 2'O-methyl-adenosine
  modified_base 5: mod_base = OTHER; note = 2'O-methyl-adenosine
  modified_base 6: mod_base = OTHER; note = 2'O-methyl-adenosine
  modified_base 7: mod_base = OTHER; note = 2'Fluoro-adenosine
  modified_base 8: mod_base = OTHER; note = 2'O-methyl-adenosine
  modified_base 9: mod_base = OTHER; note = 2' Fluoro-guanosine
  modified_base 10: mod_base = OTHER; note = 2' Fluoro-cytidine
  modified_base 11: mod_base = OTHER; note = 2'Fluoro-adenosine
  modified_base 12: mod_base = OTHER; note = 2'O-methyl-uridine
  modified_base 13: mod_base = OTHER; note = 2'O-methyl-guanosine
  modified_base 14: mod_base = OTHER; note = 2'O-methyl-adenosine
  modified_base 15: mod_base = OTHER; note = 2'O-methyl-cytidine
  modified_base 16: mod_base = OTHER; note = 2'O-methyl-adenosine
  modified_base 17: mod_base = OTHER; note = 2'O-methyl-adenosine
  modified_base 18: mod_base = OTHER; note = 2'O-methyl-adenosine
  modified_base 19: mod_base = OTHER; note = 2'O-methyl-cytidine
  modified_base 20: mod_base = OTHER; note = 2'O-methyl-adenosine
  modified_base 21: mod_base = OTHER; note = 2'O-methyl-guanosine
  modified_base 1..2: mod_base = OTHER; note = phosphorothioate linkage
  modified_base 2..3: mod_base = OTHER; note = phosphorothioate linkage
  modified_base 19..20: mod_base = OTHER; note = phosphorothioate linkage
  modified_base 20..21: mod_base = OTHER; note = phosphorothioate linkage
  source 1..21: mol_type = other RNA
gcaaaaaagcatgacaaacag

SEQ ID NO: 587 - RNA, 21 nt, synthetic construct
  misc_feature 1..21: note = siRNA sequence name:ETXS281
  modified_base 1: mod_base = OTHER; note = 2'O-methyl-uridine
  modified_base 2: mod_base = OTHER; note = 2'O-methyl-uridine
  modified_base 3: mod_base = OTHER; note = 2'O-methyl-cytidine
  modified_base 4: mod_base = OTHER; note = 2'O-methyl-cytidine
  modified_base 5: mod_base = OTHER; note = 2'O-methyl-guanosine
  modified_base 6: mod_base = OTHER; note = 2'O-methyl-guanosine
  modified_base 7: mod_base = OTHER; note = 2' Fluoro-cytidine
  modified_base 8: mod_base = OTHER; note = 2'O-methyl-uridine
  modified_base 9: mod_base = OTHER; note = 2' Fluoro-guanosine
  modified_base 10: mod_base = OTHER; note = 2'Fluoro-adenosine
  modified_base 11: mod_base = OTHER; note = 2'Fluoro-adenosine
  modified_base 12: mod_base = OTHER; note = 2'O-methyl-uridine
  modified_base 13: mod_base = OTHER; note = 2'O-methyl-guanosine
  modified_base 14: mod_base = OTHER; note = 2'O-methyl-adenosine
  modified_base 15: mod_base = OTHER; note = 2'O-methyl-guanosine
  modified_base 16: mod_base = OTHER; note = 2'O-methyl-adenosine
  modified_base 17: mod_base = OTHER; note = 2'O-methyl-guanosine
  modified_base 18: mod_base = OTHER; note = 2'O-methyl-adenosine
  modified_base 19: mod_base = OTHER; note = 2'O-methyl-guanosine
  modified_base 20: mod_base = OTHER; note = 2'O-methyl-adenosine
  modified_base 21: mod_base = OTHER; note = 2'O-methyl-guanosine
  modified_base 1..2: mod_base = OTHER; note = phosphorothioate linkage
  modified_base 2..3: mod_base = OTHER; note = phosphorothioate linkage
  modified_base 19..20: mod_base = OTHER; note = phosphorothioate linkage
  modified_base 20..21: mod_base = OTHER; note = phosphorothioate linkage
  source 1..21: mol_type = other RNA
ttccggctgaatgagagagag

SEQ ID NO: 588 - RNA, 21 nt, synthetic construct
  misc_feature 1..21: note = siRNA sequence name:ETXS283
  modified_base 1: mod_base = OTHER; note = 2'O-methyl-guanosine
  modified_base 2: mod_base = OTHER; note = 2'O-methyl-cytidine
  modified_base 3: mod_base = OTHER; note = 2'O-methyl-adenosine
  modified_base 4: mod_base = OTHER; note = 2'O-methyl-uridine
  modified_base 5: mod_base = OTHER; note = 2'O-methyl-guanosine
  modified_base 6: mod_base = OTHER; note = 2'O-methyl-adenosine
  modified_base 7: mod_base = OTHER; note = 2' Fluoro-cytidine
  modified_base 8: mod_base = OTHER; note = 2'O-methyl-adenosine
  modified_base 9: mod_base = OTHER; note = 2'Fluoro-adenosine
  modified_base 10: mod_base = OTHER; note = 2'Fluoro-adenosine
  modified_base 11: mod_base = OTHER; note = 2' Fluoro-cytidine
  modified_base 12: mod_base = OTHER; note = 2'O-methyl-adenosine
  modified_base 13: mod_base = OTHER; note = 2'O-methyl-guanosine
  modified_base 14: mod_base = OTHER; note = 2'O-methyl-adenosine
  modified_base 15: mod_base = OTHER; note = 2'O-methyl-adenosine
  modified_base 16: mod_base = OTHER; note = 2'O-methyl-cytidine
  modified_base 17: mod_base = OTHER; note = 2'O-methyl-uridine
  modified_base 18: mod_base = OTHER; note = 2'O-methyl-cytidine
  modified_base 19: mod_base = OTHER; note = 2'O-methyl-guanosine
  modified_base 20: mod_base = OTHER; note = 2'O-methyl-adenosine
  modified_base 21: mod_base = OTHER; note = 2'O-methyl-guanosine
  modified_base 1..2: mod_base = OTHER; note = phosphorothioate linkage
  modified_base 2..3: mod_base = OTHER; note = phosphorothioate linkage
  modified_base 19..20: mod_base = OTHER; note = phosphorothioate linkage
  modified_base 20..21: mod_base = OTHER; note = phosphorothioate linkage
  source 1..21: mol_type = other RNA
gcatgacaaacagaactcgag

SEQ ID NO: 589 - RNA, 21 nt, synthetic construct
  misc_feature 1..21: note = siRNA sequence name:ETXS285
  modified_base 1: mod_base = OTHER; note = 2'O-methyl-cytidine
  modified_base 2: mod_base = OTHER; note = 2'O-methyl-uridine
  modified_base 3: mod_base = OTHER; note = 2'O-methyl-guanosine
  modified_base 4: mod_base = OTHER; note = 2'O-methyl-cytidine
  modified_base 5: mod_base = OTHER; note = 2'O-methyl-uridine
  modified_base 6: mod_base = OTHER; note = 2'O-methyl-cytidine
  modified_base 7: mod_base = OTHER; note = 2' Fluoro-uridine
  modified_base 8: mod_base = OTHER; note = 2'O-methyl-uridine
  modified_base 9: mod_base = OTHER; note = 2' Fluoro-cytidine
  modified_base 10: mod_base = OTHER; note = 2'Fluoro-adenosine
  modified_base 11: mod_base = OTHER; note = 2' Fluoro-uridine
  modified_base 12: mod_base = OTHER; note = 2'O-methyl-guanosine
  modified_base 13: mod_base = OTHER; note = 2'O-methyl-guanosine
  modified_base 14: mod_base = OTHER; note = 2'O-methyl-guanosine
  modified_base 15: mod_base = OTHER; note = 2'O-methyl-adenosine
  modified_base 16: mod_base = OTHER; note = 2'O-methyl-adenosine
  modified_base 17: mod_base = OTHER; note = 2'O-methyl-guanosine
  modified_base 18: mod_base = OTHER; note = 2'O-methyl-adenosine
  modified_base 19: mod_base = OTHER; note = 2'O-methyl-guanosine
  modified_base 20: mod_base = OTHER; note = 2'O-methyl-uridine
  modified_base 21: mod_base = OTHER; note = 2'O-methyl-guanosine
  modified_base 1..2: mod_base = OTHER; note = phosphorothioate linkage
  modified_base 2..3: mod_base = OTHER; note = phosphorothioate linkage
  modified_base 19..20: mod_base = OTHER; note = phosphorothioate linkage
  modified_base 20..21: mod_base = OTHER; note = phosphorothioate linkage
  source 1..21: mol_type = other RNA
ctgctcttcatgggaagagtg

SEQ ID NO: 590 - RNA, 21 nt, synthetic construct
  misc_feature 1..21: note = siRNA sequence name:ETXS287
  modified_base 1: mod_base = OTHER; note = 2'O-methyl-adenosine
  modified_base 2: mod_base = OTHER; note = 2'O-methyl-guanosine
  modified_base 3: mod_base = OTHER; note = 2'O-methyl-adenosine
  modified_base 4: mod_base = OTHER; note = 2'O-methyl-guanosine
  modified_base 5: mod_base = OTHER; note = 2'O-methyl-uridine
  modified_base 6: mod_base = OTHER; note = 2'O-methyl-adenosine
  modified_base 7: mod_base = OTHER; note = 2' Fluoro-uridine
  modified_base 8: mod_base = OTHER; note = 2'O-methyl-uridine
  modified_base 9: mod_base = OTHER; note = 2'Fluoro-adenosine
  modified_base 10: mod_base = OTHER; note = 2' Fluoro-cytidine
  modified_base 11: mod_base = OTHER; note = 2' Fluoro-uridine
  modified_base 12: mod_base = OTHER; note = 2'O-methyl-uridine
  modified_base 13: mod_base = OTHER; note = 2'O-methyl-uridine
  modified_base 14: mod_base = OTHER; note = 2'O-methyl-guanosine
  modified_base 15: mod_base = OTHER; note = 2'O-methyl-cytidine
  modified_base 16: mod_base = OTHER; note = 2'O-methyl-uridine
  modified_base 17: mod_base = OTHER; note = 2'O-methyl-guanosine
  modified_base 18: mod_base = OTHER; note = 2'O-methyl-adenosine
  modified_base 19: mod_base = OTHER; note = 2'O-methyl-guanosine
  modified_base 20: mod_base = OTHER; note = 2'O-methyl-guanosine
  modified_base 21: mod_base = OTHER; note = 2'O-methyl-cytidine
  modified_base 1..2: mod_base = OTHER; note = phosphorothioate linkage
  modified_base 2..3: mod_base = OTHER; note = phosphorothioate linkage
  modified_base 19..20: mod_base = OTHER; note = phosphorothioate linkage
  modified_base 20..21: mod_base = OTHER; note = phosphorothioate linkage
  source 1..21: mol_type = other RNA
agagtattactttgctgaggc

SEQ ID NO: 591 - RNA, 21 nt, synthetic construct
  misc_feature 1..21: note = siRNA sequence name:ETXS289
  modified_base 1: mod_base = OTHER; note = 2'O-methyl-cytidine
  modified_base 2: mod_base = OTHER; note = 2'O-methyl-uridine
  modified_base 3: mod_base = OTHER; note = 2'O-methyl-uridine
  modified_base 4: mod_base = OTHER; note = 2'O-methyl-cytidine
  modified_base 5: mod_base = OTHER; note = 2'O-methyl-adenosine
  modified_base 6: mod_base = OTHER; note = 2'O-methyl-guanosine
  modified_base 7: mod_base = OTHER; note = 2' Fluoro-guanosine
  modified_base 8: mod_base = OTHER; note = 2'O-methyl-adenosine
  modified_base 9: mod_base = OTHER; note = 2' Fluoro-guanosine
  modified_base 10: mod_base = OTHER; note = 2' Fluoro-guanosine
  modified_base 11: mod_base = OTHER; note = 2'Fluoro-adenosine
  modified_base 12: mod_base = OTHER; note = 2'O-methyl-adenosine
  modified_base 13: mod_base = OTHER; note = 2'O-methyl-uridine
  modified_base 14: mod_base = OTHER; note = 2'O-methyl-uridine
  modified_base 15: mod_base = OTHER; note = 2'O-methyl-uridine
  modified_base 16: mod_base = OTHER; note = 2'O-methyl-uridine
  modified_base 17: mod_base = OTHER; note = 2'O-methyl-guanosine
  modified_base 18: mod_base = OTHER; note = 2'O-methyl-guanosine
  modified_base 19: mod_base = OTHER; note = 2'O-methyl-guanosine
  modified_base 20: mod_base = OTHER; note = 2'O-methyl-uridine
  modified_base 21: mod_base = OTHER; note = 2'O-methyl-adenosine
  modified_base 1..2: mod_base = OTHER; note = phosphorothioate linkage
  modified_base 2..3: mod_base = OTHER; note = phosphorothioate linkage
  modified_base 19..20: mod_base = OTHER; note = phosphorothioate linkage
  modified_base 20..21: mod_base = OTHER; note = phosphorothioate linkage
  source 1..21: mol_type = other RNA
cttcaggaggaattttgggta

SEQ ID NO: 592 - RNA, 21 nt, synthetic construct
  misc_feature 1..21: note = siRNA sequence name:ETXS291
  modified_base 1: mod_base = OTHER; note = 2'O-methyl-adenosine
  modified_base 2: mod_base = OTHER; note = 2'O-methyl-adenosine
  modified_base 3: mod_base = OTHER; note = 2'O-methyl-guanosine
  modified_base 4: mod_base = OTHER; note = 2'O-methyl-cytidine
  modified_base 5: mod_base = OTHER; note = 2'O-methyl-adenosine
  modified_base 6: mod_base = OTHER; note = 2'O-methyl-uridine
  modified_base 7: mod_base = OTHER; note = 2' Fluoro-guanosine
  modified_base 8: mod_base = OTHER; note = 2'O-methyl-adenosine
  modified_base 9: mod_base = OTHER; note = 2' Fluoro-cytidine
  modified_base 10: mod_base = OTHER; note = 2'Fluoro-adenosine
  modified_base 11: mod_base = OTHER; note = 2'Fluoro-adenosine
  modified_base 12: mod_base = OTHER; note = 2'O-methyl-adenosine
  modified_base 13: mod_base = OTHER; note = 2'O-methyl-cytidine
  modified_base 14: mod_base = OTHER; note = 2'O-methyl-adenosine
  modified_base 15: mod_base = OTHER; note = 2'O-methyl-guanosine
  modified_base 16: mod_base = OTHER; note = 2'O-methyl-adenosine
  modified_base 17: mod_base = OTHER; note = 2'O-methyl-adenosine
  modified_base 18: mod_base = OTHER; note = 2'O-methyl-cytidine
  modified_base 19: mod_base = OTHER; note = 2'O-methyl-uridine
  modified_base 20: mod_base = OTHER; note = 2'O-methyl-cytidine
  modified_base 21: mod_base = OTHER; note = 2'O-methyl-guanosine
  modified_base 1..2: mod_base = OTHER; note = phosphorothioate linkage
  modified_base 2..3: mod_base = OTHER; note = phosphorothioate linkage
  modified_base 19..20: mod_base = OTHER; note = phosphorothioate linkage
  modified_base 20..21: mod_base = OTHER; note = phosphorothioate linkage
  source 1..21: mol_type = other RNA
aagcatgacaaacagaactcg

SEQ ID NO: 593 - RNA, 21 nt, synthetic construct
  misc_feature 1..21: note = siRNA sequence name:ETXS293
  modified_base 1: mod_base = OTHER; note = 2'O-methyl-guanosine
  modified_base 2: mod_base = OTHER; note = 2'O-methyl-uridine
  modified_base 3: mod_base = OTHER; note = 2'O-methyl-guanosine
  modified_base 4: mod_base = OTHER; note = 2'O-methyl-adenosine
  modified_base 5: mod_base = OTHER; note = 2'O-methyl-adenosine
  modified_base 6: mod_base = OTHER; note = 2'O-methyl-uridine
  modified_base 7: mod_base = OTHER; note = 2'Fluoro-adenosine
  modified_base 8: mod_base = OTHER; note = 2'O-methyl-adenosine
  modified_base 9: mod_base = OTHER; note = 2'Fluoro-adenosine
  modified_base 10: mod_base = OTHER; note = 2' Fluoro-uridine
  modified_base 11: mod_base = OTHER; note = 2' Fluoro-uridine
  modified_base 12: mod_base = OTHER; note = 2'O-methyl-cytidine
  modified_base 13: mod_base = OTHER; note = 2'O-methyl-cytidine
  modified_base 14: mod_base = OTHER; note = 2'O-methyl-cytidine
  modified_base 15: mod_base = OTHER; note = 2'O-methyl-adenosine
  modified_base 16: mod_base = OTHER; note = 2'O-methyl-guanosine
  modified_base 17: mod_base = OTHER; note = 2'O-methyl-uridine
  modified_base 18: mod_base = OTHER; note = 2'O-methyl-guanosine
  modified_base 19: mod_base = OTHER; note = 2'O-methyl-guanosine
  modified_base 20: mod_base = OTHER; note = 2'O-methyl-adenosine
  modified_base 21: mod_base = OTHER; note = 2'O-methyl-adenosine
  modified_base 1..2: mod_base = OTHER; note = phosphorothioate linkage
  modified_base 2..3: mod_base = OTHER; note = phosphorothioate linkage
  modified_base 19..20: mod_base = OTHER; note = phosphorothioate linkage
  modified_base 20..21: mod_base = OTHER; note = phosphorothioate linkage
  source 1..21: mol_type = other RNA
gtgaataaattcccagtggaa

SEQ ID NO: 594 - RNA, 21 nt, synthetic construct
  misc_feature 1..21: note = siRNA sequence name:ETXS295
  modified_base 1: mod_base = OTHER; note = 2'O-methyl-guanosine
  modified_base 2: mod_base = OTHER; note = 2'O-methyl-guanosine
  modified_base 3: mod_base = OTHER; note = 2'O-methyl-adenosine
  modified_base 4: mod_base = OTHER; note = 2'O-methyl-uridine
  modified_base 5: mod_base = OTHER; note = 2'O-methyl-cytidine
  modified_base 6: mod_base = OTHER; note = 2'O-methyl-cytidine
  modified_base 7: mod_base = OTHER; note = 2'Fluoro-adenosine
  modified_base 8: mod_base = OTHER; note = 2'O-methyl-guanosine
  modified_base 9: mod_base = OTHER; note = 2' Fluoro-cytidine
  modified_base 10: mod_base = OTHER; note = 2' Fluoro-guanosine
  modified_base 11: mod_base = OTHER; note = 2' Fluoro-uridine
  modified_base 12: mod_base = OTHER; note = 2'O-methyl-cytidine
  modified_base 13: mod_base = OTHER; note = 2'O-methyl-uridine
  modified_base 14: mod_base = OTHER; note = 2'O-methyl-uridine
  modified_base 15: mod_base = OTHER; note = 2'O-methyl-adenosine
  modified_base 16: mod_base = OTHER; note = 2'O-methyl-adenosine
  modified_base 17: mod_base = OTHER; note = 2'O-methyl-cytidine
  modified_base 18: mod_base = OTHER; note = 2'O-methyl-adenosine
  modified_base 19: mod_base = OTHER; note = 2'O-methyl-uridine
  modified_base 20: mod_base = OTHER; note = 2'O-methyl-cytidine
  modified_base 21: mod_base = OTHER; note = 2'O-methyl-cytidine
  modified_base 1..2: mod_base = OTHER; note = phosphorothioate linkage
  modified_base 2..3: mod_base = OTHER; note = phosphorothioate linkage
  modified_base 19..20: mod_base = OTHER; note = phosphorothioate linkage
  modified_base 20..21: mod_base = OTHER; note = phosphorothioate linkage
  source 1..21: mol_type = other RNA
ggatccagcgtcttaacatcc

SEQ ID NO: 595 - RNA, 21 nt, synthetic construct
  misc_feature 1..21: note = siRNA sequence name:ETXS297
  modified_base 1: mod_base = OTHER; note = 2'O-methyl-guanosine
  modified_base 2: mod_base = OTHER; note = 2'O-methyl-adenosine
  modified_base 3: mod_base = OTHER; note = 2'O-methyl-cytidine
  modified_base 4: mod_base = OTHER; note = 2'O-methyl-adenosine
  modified_base 5: mod_base = OTHER; note = 2'O-methyl-adenosine
  modified_base 6: mod_base = OTHER; note = 2'O-methyl-adenosine
  modified_base 7: mod_base = OTHER; note = 2' Fluoro-cytidine
  modified_base 8: mod_base = OTHER; note = 2'O-methyl-adenosine
  modified_base 9: mod_base = OTHER; note = 2' Fluoro-guanosine
  modified_base 10: mod_base = OTHER; note = 2'Fluoro-adenosine
  modified_base 11: mod_base = OTHER; note = 2'Fluoro-adenosine
  modified_base 12: mod_base = OTHER; note = 2'O-methyl-cytidine
  modified_base 13: mod_base = OTHER; note = 2'O-methyl-uridine
  modified_base 14: mod_base = OTHER; note = 2'O-methyl-cytidine
  modified_base 15: mod_base = OTHER; note = 2'O-methyl-guanosine
  modified_base 16: mod_base = OTHER; note = 2'O-methyl-adenosine
  modified_base 17: mod_base = OTHER; note = 2'O-methyl-guanosine
  modified_base 18: mod_base = OTHER; note = 2'O-methyl-adenosine
  modified_base 19: mod_base = OTHER; note = 2'O-methyl-adenosine
  modified_base 20: mod_base = OTHER; note = 2'O-methyl-guanosine
  modified_base 21: mod_base = OTHER; note = 2'O-methyl-uridine
  modified_base 1..2: mod_base = OTHER; note = phosphorothioate linkage
  modified_base 2..3: mod_base = OTHER; note = phosphorothioate linkage
  modified_base 19..20: mod_base = OTHER; note = phosphorothioate linkage
  modified_base 20..21: mod_base = OTHER; note = phosphorothioate linkage
  source 1..21: mol_type = other RNA
gacaaacagaactcgagaagt

SEQ ID NO: 596 - RNA, 21 nt, synthetic construct
  misc_feature 1..21: note = siRNA sequence name:ETXS299
  modified_base 1: mod_base = OTHER; note = 2'O-methyl-adenosine
  modified_base 2: mod_base = OTHER; note = 2'O-methyl-uridine
  modified_base 3: mod_base = OTHER; note = 2'O-methyl-cytidine
  modified_base 4: mod_base = OTHER; note = 2'O-methyl-uridine
  modified_base 5: mod_base = OTHER; note = 2'O-methyl-cytidine
  modified_base 6: mod_base = OTHER; note = 2'O-methyl-adenosine
  modified_base 7: mod_base = OTHER; note = 2' Fluoro-guanosine
  modified_base 8: mod_base = OTHER; note = 2'O-methyl-adenosine
  modified_base 9: mod_base = OTHER; note = 2' Fluoro-cytidine
  modified_base 10: mod_base = OTHER; note = 2' Fluoro-cytidine
  modified_base 11: mod_base = OTHER; note = 2'Fluoro-adenosine
  modified_base 12: mod_base = OTHER; note = 2'O-methyl-adenosine
  modified_base 13: mod_base = OTHER; note = 2'O-methyl-adenosine
  modified_base 14: mod_base = OTHER; note = 2'O-methyl-guanosine
  modified_base 15: mod_base = OTHER; note = 2'O-methyl-guanosine
  modified_base 16: mod_base = OTHER; note = 2'O-methyl-adenosine
  modified_base 17: mod_base = OTHER; note = 2'O-methyl-uridine
  modified_base 18: mod_base = OTHER; note = 2'O-methyl-cytidine
  modified_base 19: mod_base = OTHER; note = 2'O-methyl-guanosine
  modified_base 20: mod_base = OTHER; note = 2'O-methyl-cytidine
  modified_base 21: mod_base = OTHER; note = 2'O-methyl-cytidine
  modified_base 1..2: mod_base = OTHER; note = phosphorothioate linkage
  modified_base 2..3: mod_base = OTHER; note = phosphorothioate linkage
  modified_base 19..20: mod_base = OTHER; note = phosphorothioate linkage
  modified_base 20..21: mod_base = OTHER; note = phosphorothioate linkage
  source 1..21: mol_type = other RNA
atctcagaccaaaggatcgcc

SEQ ID NO: 597 - RNA, 21 nt, synthetic construct
  misc_feature 1..21: note = siRNA sequence name:ETXS301
  modified_base 1: mod_base = OTHER; note = 2'O-methyl-cytidine
  modified_base 2: mod_base = OTHER; note = 2'O-methyl-adenosine
  modified_base 3: mod_base = OTHER; note = 2'O-methyl-adenosine
  modified_base 4: mod_base = OTHER; note = 2'O-methyl-cytidine
  modified_base 5: mod_base = OTHER; note = 2'O-methyl-uridine
  modified_base 6: mod_base = OTHER; note = 2'O-methyl-uridine
  modified_base 7: mod_base = OTHER; note = 2' Fluoro-cytidine
  modified_base 8: mod_base = OTHER; note = 2'O-methyl-cytidine
  modified_base 9: mod_base = OTHER; note = 2' Fluoro-guanosine
  modified_base 10: mod_base = OTHER; note = 2' Fluoro-guanosine
  modified_base 11: mod_base = OTHER; note = 2' Fluoro-cytidine
  modified_base 12: mod_base = OTHER; note = 2'O-methyl-uridine
  modified_base 13: mod_base = OTHER; note = 2'O-methyl-guanosine
  modified_base 14: mod_base = OTHER; note = 2'O-methyl-adenosine
  modified_base 15: mod_base = OTHER; note = 2'O-methyl-adenosine
  modified_base 16: mod_base = OTHER; note = 2'O-methyl-uridine
  modified_base 17: mod_base = OTHER; note = 2'O-methyl-guanosine
  modified_base 18: mod_base = OTHER; note = 2'O-methyl-adenosine
  modified_base 19: mod_base = OTHER; note = 2'O-methyl-guanosine
  modified_base 20: mod_base = OTHER; note = 2'O-methyl-adenosine
  modified_base 21: mod_base = OTHER; note = 2'O-methyl-guanosine
  modified_base 1..2: mod_base = OTHER; note = phosphorothioate linkage
  modified_base 2..3: mod_base = OTHER; note = phosphorothioate linkage
  modified_base 19..20: mod_base = OTHER; note = phosphorothioate linkage
  modified_base 20..21: mod_base = OTHER; note = phosphorothioate linkage
  source 1..21: mol_type = other RNA
caacttccggctgaatgagag

SEQ ID NO: 598 - RNA, 21 nt, synthetic construct
  misc_feature 1..21: note = siRNA sequence name:ETXS303
  modified_base 1: mod_base = OTHER; note = 2'O-methyl-uridine
  modified_base 2: mod_base = OTHER; note = 2'O-methyl-uridine
  modified_base 3: mod_base = OTHER; note = 2'O-methyl-cytidine
  modified_base 4: mod_base = OTHER; note = 2'O-methyl-adenosine
  modified_base 5: mod_base = OTHER; note = 2'O-methyl-guanosine
  modified_base 6: mod_base = OTHER; note = 2'O-methyl-guanosine
  modified_base 7: mod_base = OTHER; note = 2'Fluoro-adenosine
  modified_base 8: mod_base = OTHER; note = 2'O-methyl-guanosine
  modified_base 9: mod_base = OTHER; note = 2' Fluoro-guanosine
  modified_base 10: mod_base = OTHER; note = 2'Fluoro-adenosine
  modified_base 11: mod_base = OTHER; note = 2'Fluoro-adenosine
  modified_base 12: mod_base = OTHER; note = 2'O-methyl-uridine
  modified_base 13: mod_base = OTHER; note = 2'O-methyl-uridine
  modified_base 14: mod_base = OTHER; note = 2'O-methyl-uridine
  modified_base 15: mod_base = OTHER; note = 2'O-methyl-uridine
  modified_base 16: mod_base = OTHER; note = 2'O-methyl-guanosine
  modified_base 17: mod_base = OTHER; note = 2'O-methyl-guanosine
  modified_base 18: mod_base = OTHER; note = 2'O-methyl-guanosine
  modified_base 19: mod_base = OTHER; note = 2'O-methyl-uridine
  modified_base 20: mod_base = OTHER; note = 2'O-methyl-adenosine
  modified_base 21: mod_base = OTHER; note = 2'O-methyl-cytidine
  modified_base 1..2: mod_base = OTHER; note = phosphorothioate linkage
  modified_base 2..3: mod_base = OTHER; note = phosphorothioate linkage
  modified_base 19..20: mod_base = OTHER; note = phosphorothioate linkage
  modified_base 20..21: mod_base = OTHER; note = phosphorothioate linkage
  source 1..21: mol_type = other RNA
ttcaggaggaattttgggtac

SEQ ID NO: 599 - RNA, 21 nt, synthetic construct
  misc_feature 1..21: note = siRNA sequence name:ETXS305
  modified_base 1: mod_base = OTHER; note = 2'O-methyl-guanosine
  modified_base 2: mod_base = OTHER; note = 2'O-methyl-adenosine
  modified_base 3: mod_base = OTHER; note = 2'O-methyl-guanosine
  modified_base 4: mod_base = OTHER; note = 2'O-methyl-adenosine
  modified_base 5: mod_base = OTHER; note = 2'O-methyl-guanosine
  modified_base 6: mod_base = OTHER; note = 2'O-methyl-uridine
  modified_base 7: mod_base = OTHER; note = 2'Fluoro-adenosine
  modified_base 8: mod_base = OTHER; note = 2'O-methyl-uridine
  modified_base 9: mod_base = OTHER; note = 2' Fluoro-uridine
  modified_base 10: mod_base = OTHER; note = 2'Fluoro-adenosine
  modified_base 11: mod_base = OTHER; note = 2' Fluoro-cytidine
  modified_base 12: mod_base = OTHER; note = 2'O-methyl-uridine
  modified_base 13: mod_base = OTHER; note = 2'O-methyl-uridine
  modified_base 14: mod_base = OTHER; note = 2'O-methyl-uridine
  modified_base 15: mod_base = OTHER; note = 2'O-methyl-guanosine
  modified_base 16: mod_base = OTHER; note = 2'O-methyl-cytidine
  modified_base 17: mod_base = OTHER; note = 2'O-methyl-uridine
  modified_base 18: mod_base = OTHER; note = 2'O-methyl-guanosine
  modified_base 19: mod_base = OTHER; note = 2'O-methyl-adenosine
  modified_base 20: mod_base = OTHER; note = 2'O-methyl-guanosine
  modified_base 21: mod_base = OTHER; note = 2'O-methyl-guanosine
  modified_base 1..2: mod_base = OTHER; note = phosphorothioate linkage
  modified_base 2..3: mod_base = OTHER; note = phosphorothioate linkage
  modified_base 19..20: mod_base = OTHER; note = phosphorothioate linkage
  modified_base 20..21: mod_base = OTHER; note = phosphorothioate linkage
  source 1..21: mol_type = other RNA
gagagtattactttgctgagg

SEQ ID NO: 600 - RNA, 21 nt, synthetic construct
  misc_feature 1..21: note = siRNA sequence name:ETXS307
  modified_base 1: mod_base = OTHER; note = 2'O-methyl-cytidine
  modified_base 2: mod_base = OTHER; note = 2'O-methyl-cytidine
  modified_base 3: mod_base = OTHER; note = 2'O-methyl-adenosine
  modified_base 4: mod_base = OTHER; note = 2'O-methyl-cytidine
  modified_base 5: mod_base = OTHER; note = 2'O-methyl-adenosine
  modified_base 6: mod_base = OTHER; note = 2'O-methyl-adenosine
  modified_base 7: mod_base = OTHER; note = 2' Fluoro-cytidine
  modified_base 8: mod_base = OTHER; note = 2'O-methyl-uridine
  modified_base 9: mod_base = OTHER; note = 2' Fluoro-uridine
  modified_base 10: mod_base = OTHER; note = 2' Fluoro-cytidine
  modified_base 11: mod_base = OTHER; note = 2' Fluoro-cytidine
  modified_base 12: mod_base = OTHER; note = 2'O-methyl-guanosine
  modified_base 13: mod_base = OTHER; note = 2'O-methyl-guanosine
  modified_base 14: mod_base = OTHER; note = 2'O-methyl-cytidine
  modified_base 15: mod_base = OTHER; note = 2'O-methyl-uridine
  modified_base 16: mod_base = OTHER; note = 2'O-methyl-guanosine
  modified_base 17: mod_base = OTHER; note = 2'O-methyl-adenosine
  modified_base 18: mod_base = OTHER; note = 2'O-methyl-adenosine
  modified_base 19: mod_base = OTHER; note = 2'O-methyl-uridine
  modified_base 20: mod_base = OTHER; note = 2'O-methyl-guanosine
  modified_base 21: mod_base = OTHER; note = 2'O-methyl-adenosine
  modified_base 1..2: mod_base = OTHER; note = phosphorothioate linkage
  modified_base 2..3: mod_base = OTHER; note = phosphorothioate linkage
  modified_base 19..20: mod_base = OTHER; note = phosphorothioate linkage
  modified_base 20..21: mod_base = OTHER; note = phosphorothioate linkage
  source 1..21: mol_type = other RNA
ccacaacttccggctgaatga

SEQ ID NO: 601 - RNA, 21 nt, synthetic construct
  misc_feature 1..21: note = siRNA sequence name:ETXS309
  modified_base 1: mod_base = OTHER; note = 2'O-methyl-cytidine
  modified_base 2: mod_base = OTHER; note = 2'O-methyl-guanosine
  modified_base 3: mod_base = OTHER; note = 2'O-methyl-guanosine
  modified_base 4: mod_base = OTHER; note = 2'O-methyl-adenosine
  modified_base 5: mod_base = OTHER; note = 2'O-methyl-uridine
  modified_base 6: mod_base = OTHER; note = 2'O-methyl-cytidine
  modified_base 7: mod_base = OTHER; note = 2' Fluoro-cytidine
  modified_base 8: mod_base = OTHER; note = 2'O-methyl-adenosine
  modified_base 9: mod_base = OTHER; note = 2' Fluoro-guanosine
  modified_base 10: mod_base = OTHER; note = 2' Fluoro-cytidine
  modified_base 11: mod_base = OTHER; note = 2' Fluoro-guanosine
  modified_base 12: mod_base = OTHER; note = 2'O-methyl-uridine
  modified_base 13: mod_base = OTHER; note = 2'O-methyl-cytidine
  modified_base 14: mod_base = OTHER; note = 2'O-methyl-uridine
  modified_base 15: mod_base = OTHER; note = 2'O-methyl-uridine
  modified_base 16: mod_base = OTHER; note = 2'O-methyl-adenosine
  modified_base 17: mod_base = OTHER; note = 2'O-methyl-adenosine
  modified_base 18: mod_base = OTHER; note = 2'O-methyl-cytidine
  modified_base 19: mod_base = OTHER; note = 2'O-methyl-adenosine
  modified_base 20: mod_base = OTHER; note = 2'O-methyl-uridine
  modified_base 21: mod_base = OTHER; note = 2'O-methyl-cytidine
  modified_base 1..2: mod_base = OTHER; note = phosphorothioate linkage
  modified_base 2..3: mod_base = OTHER; note = phosphorothioate linkage
  modified_base 19..20: mod_base = OTHER; note = phosphorothioate linkage
  modified_base 20..21: mod_base = OTHER; note = phosphorothioate linkage
  source 1..21: mol_type = other RNA
cggatccagcgtcttaacatc

SEQ ID NO: 602 - RNA, 21 nt, synthetic construct
  misc_feature 1..21: note = siRNA sequence name:ETXS311
  modified_base 1: mod_base = OTHER; note = 2'O-methyl-uridine
  modified_base 2: mod_base = OTHER; note = 2'O-methyl-cytidine
  modified_base 3: mod_base = OTHER; note = 2'O-methyl-uridine
  modified_base 4: mod_base = OTHER; note = 2'O-methyl-cytidine
  modified_base 5: mod_base = OTHER; note = 2'O-methyl-adenosine
  modified_base 6: mod_base = OTHER; note = 2'O-methyl-adenosine
  modified_base 7: mod_base = OTHER; note = 2' Fluoro-cytidine
  modified_base 8: mod_base = OTHER; note = 2'O-methyl-uridine
  modified_base 9: mod_base = OTHER; note = 2' Fluoro-guanosine
  modified_base 10: mod_base = OTHER; note = 2' Fluoro-cytidine
  modified_base 11: mod_base = OTHER; note = 2'Fluoro-adenosine
  modified_base 12: mod_base = OTHER; note = 2'O-methyl-uridine
  modified_base 13: mod_base = OTHER; note = 2'O-methyl-cytidine
  modified_base 14: mod_base = OTHER; note = 2'O-methyl-uridine
  modified_base 15: mod_base = OTHER; note = 2'O-methyl-adenosine
  modified_base 16: mod_base = OTHER; note = 2'O-methyl-cytidine
  modified_base 17: mod_base = OTHER; note = 2'O-methyl-uridine
  modified_base 18: mod_base = OTHER; note = 2'O-methyl-uridine
  modified_base 19: mod_base = OTHER; note = 2'O-methyl-cytidine
  modified_base 20: mod_base = OTHER; note = 2'O-methyl-adenosine
  modified_base 21: mod_base = OTHER; note = 2'O-methyl-adenosine
  modified_base 1..2: mod_base = OTHER; note = phosphorothioate linkage
  modified_base 2..3: mod_base = OTHER; note = phosphorothioate linkage
  modified_base 19..20: mod_base = OTHER; note = phosphorothioate linkage
  modified_base 20..21: mod_base = OTHER; note = phosphorothioate linkage
  source 1..21: mol_type = other RNA
tctcaactgcatctacttcaa

SEQ ID NO: 603 - RNA, 21 nt, synthetic construct
  misc_feature 1..21: note = siRNA sequence name:ETXS313
  modified_base 1: mod_base = OTHER; note = 2'O-methyl-guanosine
  modified_base 2: mod_base = OTHER; note = 2'O-methyl-cytidine
  modified_base 3: mod_base = OTHER; note = 2'O-methyl-adenosine
  modified_base 4: mod_base = OTHER; note = 2'O-methyl-uridine
  modified_base 5: mod_base = OTHER; note = 2'O-methyl-cytidine
  modified_base 6: mod_base = OTHER; note = 2'O-methyl-uridine
  modified_base 7: mod_base = OTHER; note = 2' Fluoro-cytidine
  modified_base 8: mod_base = OTHER; note = 2'O-methyl-adenosine
  modified_base 9: mod_base = OTHER; note = 2' Fluoro-guanosine
  modified_base 10: mod_base = OTHER; note = 2'Fluoro-adenosine
  modified_base 11: mod_base = OTHER; note = 2' Fluoro-cytidine
  modified_base 12: mod_base = OTHER; note = 2'O-methyl-cytidine
  modified_base 13: mod_base = OTHER; note = 2'O-methyl-adenosine
  modified_base 14: mod_base = OTHER; note = 2'O-methyl-adenosine
  modified_base 15: mod_base = OTHER; note = 2'O-methyl-adenosine
  modified_base 16: mod_base = OTHER; note = 2'O-methyl-guanosine
  modified_base 17: mod_base = OTHER; note = 2'O-methyl-guanosine
  modified_base 18: mod_base = OTHER; note = 2'O-methyl-adenosine
  modified_base 19: mod_base = OTHER; note = 2'O-methyl-uridine
  modified_base 20: mod_base = OTHER; note = 2'O-methyl-cytidine
  modified_base 21: mod_base = OTHER; note = 2'O-methyl-guanosine
  modified_base 1..2: mod_base = OTHER; note = phosphorothioate linkage
  modified_base 2..3: mod_base = OTHER; note = phosphorothioate linkage
  modified_base 19..20: mod_base = OTHER; note = phosphorothioate linkage
  modified_base 20..21: mod_base = OTHER; note = phosphorothioate linkage
  source 1..21: mol_type = other RNA
gcatctcagaccaaaggatcg

SEQ ID NO: 604 - RNA, 21 nt, synthetic construct
  misc_feature 1..21: note = siRNA sequence name:ETXS315
  modified_base 1: mod_base = OTHER; note = 2'O-methyl-adenosine
  modified_base 2: mod_base = OTHER; note = 2'O-methyl-adenosine
  modified_base 3: mod_base = OTHER; note = 2'O-methyl-adenosine
  modified_base 4: mod_base = OTHER; note = 2'O-methyl-guanosine
  modified_base 5: mod_base = OTHER; note = 2'O-methyl-cytidine
  modified_base 6: mod_base = OTHER; note = 2'O-methyl-adenosine
  modified_base 7: mod_base = OTHER; note = 2' Fluoro-uridine
  modified_base 8: mod_base = OTHER; note = 2'O-methyl-guanosine
  modified_base 9: mod_base = OTHER; note = 2'Fluoro-adenosine
  modified_base 10: mod_base = OTHER; note = 2' Fluoro-cytidine
  modified_base 11: mod_base = OTHER; note = 2'Fluoro-adenosine
  modified_base 12: mod_base = OTHER; note = 2'O-methyl-adenosine
  modified_base 13: mod_base = OTHER; note = 2'O-methyl-adenosine
  modified_base 14: mod_base = OTHER; note = 2'O-methyl-cytidine
  modified_base 15: mod_base = OTHER; note = 2'O-methyl-adenosine
  modified_base 16: mod_base = OTHER; note = 2'O-methyl-guanosine
  modified_base 17: mod_base = OTHER; note = 2'O-methyl-adenosine
  modified_base 18: mod_base = OTHER; note = 2'O-methyl-adenosine
  modified_base 19: mod_base = OTHER; note = 2'O-methyl-cytidine
  modified_base 20: mod_base = OTHER; note = 2'O-methyl-uridine
  modified_base 21: mod_base = OTHER; note = 2'O-methyl-cytidine
  modified_base 1..2: mod_base = OTHER; note = phosphorothioate linkage
  modified_base 2..3: mod_base = OTHER; note = phosphorothioate linkage
  modified_base 19..20: mod_base = OTHER; note = phosphorothioate linkage
  modified_base 20..21: mod_base = OTHER; note = phosphorothioate linkage
  source 1..21: mol_type = other RNA
aaagcatgacaaacagaactc

SEQ ID NO: 605 - RNA, 21 nt, synthetic construct
  misc_feature 1..21: note = siRNA sequence name:ETXS317
  modified_base 1: mod_base = OTHER; note = 2'O-methyl-uridine
  modified_base 2: mod_base = OTHER; note = 2'O-methyl-cytidine
  modified_base 3: mod_base = OTHER; note = 2'O-methyl-uridine
  modified_base 4: mod_base = OTHER; note = 2'O-methyl-guanosine
  modified_base 5: mod_base = OTHER; note = 2'O-methyl-guanosine
  modified_base 6: mod_base = OTHER; note = 2'O-methyl-adenosine
  modified_base 7: mod_base = OTHER; note = 2' Fluoro-guanosine
  modified_base 8: mod_base = OTHER; note = 2'O-methyl-adenosine
  modified_base 9: mod_base = OTHER; note = 2'Fluoro-adenosine
  modified_base 10: mod_base = OTHER; note = 2' Fluoro-uridine
  modified_base 11: mod_base = OTHER; note = 2'Fluoro-adenosine
  modified_base 12: mod_base = OTHER; note = 2'O-methyl-uridine
  modified_base 13: mod_base = OTHER; note = 2'O-methyl-adenosine
  modified_base 14: mod_base = OTHER; note = 2'O-methyl-guanosine
  modified_base 15: mod_base = OTHER; note = 2'O-methyl-adenosine
  modified_base 16: mod_base = OTHER; note = 2'O-methyl-cytidine
  modified_base 17: mod_base = OTHER; note = 2'O-methyl-cytidine
  modified_base 18: mod_base = OTHER; note = 2'O-methyl-cytidine
  modified_base 19: mod_base = OTHER; note = 2'O-methyl-uridine
  modified_base 20: mod_base = OTHER; note = 2'O-methyl-guanosine
  modified_base 21: mod_base = OTHER; note = 2'O-methyl-cytidine
  modified_base 1..2: mod_base = OTHER; note = phosphorothioate linkage
  modified_base 2..3: mod_base = OTHER; note = phosphorothioate linkage
  modified_base 19..20: mod_base = OTHER; note = phosphorothioate linkage
  modified_base 20..21: mod_base = OTHER; note = phosphorothioate linkage
  source 1..21: mol_type = other RNA
tctggagaatatagaccctgc

SEQ ID NO: 606 - RNA, 21 nt, synthetic construct
  misc_feature 1..21: note = siRNA sequence name:ETXS319
  modified_base 1: mod_base = OTHER; note = 2'O-methyl-adenosine
  modified_base 2: mod_base = OTHER; note = 2'O-methyl-guanosine
  modified_base 3: mod_base = OTHER; note = 2'O-methyl-adenosine
  modified_base 4: mod_base = OTHER; note = 2'O-methyl-guanosine
  modified_base 5: mod_base = OTHER; note = 2'O-methyl-adenosine
  modified_base 6: mod_base = OTHER; note = 2'O-methyl-guanosine
  modified_base 7: mod_base = OTHER; note = 2' Fluoro-uridine
  modified_base 8: mod_base = OTHER; note = 2'O-methyl-adenosine
  modified_base 9: mod_base = OTHER; note = 2' Fluoro-uridine
  modified_base 10: mod_base = OTHER; note = 2' Fluoro-uridine
  modified_base 11: mod_base = OTHER; note = 2'Fluoro-adenosine
  modified_base 12: mod_base = OTHER; note = 2'O-methyl-cytidine
  modified_base 13: mod_base = OTHER; note = 2'O-methyl-uridine
  modified_base 14: mod_base = OTHER; note = 2'O-methyl-uridine
  modified_base 15: mod_base = OTHER; note = 2'O-methyl-uridine
  modified_base 16: mod_base = OTHER; note = 2'O-methyl-guanosine
  modified_base 17: mod_base = OTHER; note = 2'O-methyl-cytidine
  modified_base 18: mod_base = OTHER; note = 2'O-methyl-uridine
  modified_base 19: mod_base = OTHER; note = 2'O-methyl-guanosine
  modified_base 20: mod_base = OTHER; note = 2'O-methyl-adenosine
  modified_base 21: mod_base = OTHER; note = 2'O-methyl-guanosine
  modified_base 1..2: mod_base = OTHER; note = phosphorothioate linkage
  modified_base 2..3: mod_base = OTHER; note = phosphorothioate linkage
  modified_base 19..20: mod_base = OTHER; note = phosphorothioate linkage
  modified_base 20..21: mod_base = OTHER; note = phosphorothioate linkage
  source 1..21: mol_type = other RNA
agagagtattactttgctgag

SEQ ID NO: 607 - RNA, 21 nt, synthetic construct
  misc_feature 1..21: note = siRNA sequence name:ETXS321
  modified_base 1: mod_base = OTHER; note = 2'O-methyl-cytidine
  modified_base 2: mod_base = OTHER; note = 2'O-methyl-cytidine
  modified_base 3: mod_base = OTHER; note = 2'O-methyl-guanosine
  modified_base 4: mod_base = OTHER; note = 2'O-methyl-guanosine
  modified_base 5: mod_base = OTHER; note = 2'O-methyl-cytidine
  modified_base 6: mod_base = OTHER; note = 2'O-methyl-uridine
  modified_base 7: mod_base = OTHER; note = 2' Fluoro-guanosine
  modified_base 8: mod_base = OTHER; note = 2'O-methyl-adenosine
  modified_base 9: mod_base = OTHER; note = 2'Fluoro-adenosine
  modified_base 10: mod_base = OTHER; note = 2' Fluoro-uridine
  modified_base 11: mod_base = OTHER; note = 2' Fluoro-guanosine
  modified_base 12: mod_base = OTHER; note = 2'O-methyl-adenosine
  modified_base 13: mod_base = OTHER; note = 2'O-methyl-guanosine
  modified_base 14: mod_base = OTHER; note = 2'O-methyl-adenosine
  modified_base 15: mod_base = OTHER; note = 2'O-methyl-guanosine
  modified_base 16: mod_base = OTHER; note = 2'O-methyl-adenosine
  modified_base 17: mod_base = OTHER; note = 2'O-methyl-guanosine
  modified_base 18: mod_base = OTHER; note = 2'O-methyl-adenosine
  modified_base 19: mod_base = OTHER; note = 2'O-methyl-guanosine
  modified_base 20: mod_base = OTHER; note = 2'O-methyl-guanosine
  modified_base 21: mod_base = OTHER; note = 2'O-methyl-uridine
  modified_base 1..2: mod_base = OTHER; note = phosphorothioate linkage
  modified_base 2..3: mod_base = OTHER; note = phosphorothioate linkage
  modified_base 19..20: mod_base = OTHER; note = phosphorothioate linkage
  modified_base 20..21: mod_base = OTHER; note = phosphorothioate linkage
  source 1..21: mol_type = other RNA
ccggctgaatgagagagaggt

SEQ ID NO: 608 - RNA, 21 nt, synthetic construct
  misc_feature 1..21: note = siRNA sequence name:ETXS323
  modified_base 1: mod_base = OTHER; note = 2'O-methyl-cytidine
  modified_base 2: mod_base = OTHER; note = 2'O-methyl-cytidine
  modified_base 3: mod_base = OTHER; note = 2'O-methyl-uridine
  modified_base 4: mod_base = OTHER; note = 2'O-methyl-guanosine
  modified_base 5: mod_base = OTHER; note = 2'O-methyl-guanosine
  modified_base 6: mod_base = OTHER; note = 2'O-methyl-guanosine
  modified_base 7: mod_base = OTHER; note = 2' Fluoro-uridine
  modified_base 8: mod_base = OTHER; note = 2'O-methyl-guanosine
  modified_base 9: mod_base = OTHER; note = 2'Fluoro-adenosine
  modified_base 10: mod_base = OTHER; note = 2'Fluoro-adenosine
  modified_base 11: mod_base = OTHER; note = 2' Fluoro-uridine
  modified_base 12: mod_base = OTHER; note = 2'O-methyl-adenosine
  modified_base 13: mod_base = OTHER; note = 2'O-methyl-adenosine
  modified_base 14: mod_base = OTHER; note = 2'O-methyl-adenosine
  modified_base 15: mod_base = OTHER; note = 2'O-methyl-uridine
  modified_base 16: mod_base = OTHER; note = 2'O-methyl-uridine
  modified_base 17: mod_base = OTHER; note = 2'O-methyl-cytidine
  modified_base 18: mod_base = OTHER; note = 2'O-methyl-cytidine
  modified_base 19: mod_base = OTHER; note = 2'O-methyl-cytidine
  modified_base 20: mod_base = OTHER; note = 2'O-methyl-adenosine
  modified_base 21: mod_base = OTHER; note = 2'O-methyl-guanosine
  modified_base 1..2: mod_base = OTHER; note = phosphorothioate linkage
  modified_base 2..3: mod_base = OTHER; note = phosphorothioate linkage
  modified_base 19..20: mod_base = OTHER; note = phosphorothioate linkage
  modified_base 20..21: mod_base = OTHER; note = phosphorothioate linkage
  source 1..21: mol_type = other RNA
cctgggtgaataaattcccag

SEQ ID NO: 609 - RNA, 21 nt, synthetic construct
  misc_feature 1..21: note = siRNA sequence name:ETXS325
  modified_base 1: mod_base = OTHER; note = 2'O-methyl-cytidine
  modified_base 2: mod_base = OTHER; note = 2'O-methyl-uridine
  modified_base 3: mod_base = OTHER; note = 2'O-methyl-uridine
  modified_base 4: mod_base = OTHER; note = 2'O-methyl-adenosine
  modified_base 5: mod_base = OTHER; note = 2'O-methyl-guanosine
  modified_base 6: mod_base = OTHER; note = 2'O-methyl-guanosine
  modified_base 7: mod_base = OTHER; note = 2' Fluoro-uridine
  modified_base 8: mod_base = OTHER; note = 2'O-methyl-cytidine
  modified_base 9: mod_base = OTHER; note = 2' Fluoro-uridine
  modified_base 10: mod_base = OTHER; note = 2' Fluoro-guanosine
  modified_base 11: mod_base = OTHER; note = 2'Fluoro-adenosine
  modified_base 12: mod_base = OTHER; note = 2'O-methyl-adenosine
  modified_base 13: mod_base = OTHER; note = 2'O-methyl-guanosine
  modified_base 14: mod_base = OTHER; note = 2'O-methyl-guanosine
  modified_base 15: mod_base = OTHER; note = 2'O-methyl-guanosine
  modified_base 16: mod_base = OTHER; note = 2'O-methyl-adenosine
  modified_base 17: mod_base = OTHER; note = 2'O-methyl-guanosine
  modified_base 18: mod_base = OTHER; note = 2'O-methyl-adenosine
  modified_base 19: mod_base = OTHER; note = 2'O-methyl-guanosine
  modified_base 20: mod_base = OTHER; note = 2'O-methyl-adenosine
  modified_base 21: mod_base = OTHER; note = 2'O-methyl-cytidine
  modified_base 1..2: mod_base = OTHER; note = phosphorothioate linkage
  modified_base 2..3: mod_base = OTHER; note = phosphorothioate linkage
  modified_base 19..20: mod_base = OTHER; note = phosphorothioate linkage
  modified_base 20..21: mod_base = OTHER; note = phosphorothioate linkage
  source 1..21: mol_type = other RNA
cttaggtctgaagggagagac

SEQ ID NO: 610 - RNA, 21 nt, synthetic construct
  misc_feature 1..21: note = siRNA sequence name:ETXS327
  modified_base 1: mod_base = OTHER; note = 2'O-methyl-cytidine
  modified_base 2: mod_base = OTHER; note = 2'O-methyl-uridine
  modified_base 3: mod_base = OTHER; note = 2'O-methyl-uridine
  modified_base 4: mod_base = OTHER; note = 2'O-methyl-cytidine
  modified_base 5: mod_base = OTHER; note = 2'O-methyl-cytidine
  modified_base 6: mod_base = OTHER; note = 2'O-methyl-guanosine
  modified_base 7: mod_base = OTHER; note = 2' Fluoro-guanosine
  modified_base 8: mod_base = OTHER; note = 2'O-methyl-cytidine
  modified_base 9: mod_base = OTHER; note = 2' Fluoro-uridine
  modified_base 10: mod_base = OTHER; note = 2' Fluoro-guanosine
  modified_base 11: mod_base = OTHER; note = 2'Fluoro-adenosine
  modified_base 12: mod_base = OTHER; note = 2'O-methyl-adenosine
  modified_base 13: mod_base = OTHER; note = 2'O-methyl-uridine
  modified_base 14: mod_base = OTHER; note = 2'O-methyl-guanosine
  modified_base 15: mod_base = OTHER; note = 2'O-methyl-adenosine
  modified_base 16: mod_base = OTHER; note = 2'O-methyl-guanosine
  modified_base 17: mod_base = OTHER; note = 2'O-methyl-adenosine
  modified_base 18: mod_base = OTHER; note = 2'O-methyl-guanosine
  modified_base 19: mod_base = OTHER; note = 2'O-methyl-adenosine
  modified_base 20: mod_base = OTHER; note = 2'O-methyl-guanosine
  modified_base 21: mod_base = OTHER; note = 2'O-methyl-adenosine
  modified_base 1..2: mod_base = OTHER; note = phosphorothioate linkage
  modified_base 2..3: mod_base = OTHER; note = phosphorothioate linkage
  modified_base 19..20: mod_base = OTHER; note = phosphorothioate linkage
  modified_base 20..21: mod_base = OTHER; note = phosphorothioate linkage
  source 1..21: mol_type = other RNA
cttccggctgaatgagagaga

SEQ ID NO: 611 - RNA, 21 nt, synthetic construct
  misc_feature 1..21: note = siRNA sequence name:ETXS329
  modified_base 1: mod_base = OTHER; note = 2'O-methyl-uridine
  modified_base 2: mod_base = OTHER; note = 2'O-methyl-adenosine
  modified_base 3: mod_base = OTHER; note = 2'O-methyl-adenosine
  modified_base 4: mod_base = OTHER; note = 2'O-methyl-adenosine
  modified_base 5: mod_base = OTHER; note = 2'O-methyl-uridine
  modified_base 6: mod_base = OTHER; note = 2'O-methyl-uridine
  modified_base 7: mod_base = OTHER; note = 2' Fluoro-cytidine
  modified_base 8: mod_base = OTHER; note = 2'O-methyl-cytidine
  modified_base 9: mod_base = OTHER; note = 2' Fluoro-cytidine
  modified_base 10: mod_base = OTHER; note = 2'Fluoro-adenosine
  modified_base 11: mod_base = OTHER; note = 2' Fluoro-guanosine
  modified_base 12: mod_base = OTHER; note = 2'O-methyl-uridine
  modified_base 13: mod_base = OTHER; note = 2'O-methyl-guanosine
  modified_base 14: mod_base = OTHER; note = 2'O-methyl-guanosine
  modified_base 15: mod_base = OTHER; note = 2'O-methyl-adenosine
  modified_base 16: mod_base = OTHER; note = 2'O-methyl-adenosine
  modified_base 17: mod_base = OTHER; note = 2'O-methyl-adenosine
  modified_base 18: mod_base = OTHER; note = 2'O-methyl-uridine
  modified_base 19: mod_base = OTHER; note = 2'O-methyl-guanosine
  modified_base 20: mod_base = OTHER; note = 2'O-methyl-adenosine
  modified_base 21: mod_base = OTHER; note = 2'O-methyl-cytidine
  modified_base 1..2: mod_base = OTHER; note = phosphorothioate linkage
  modified_base 2..3: mod_base = OTHER; note = phosphorothioate linkage
  modified_base 19..20: mod_base = OTHER; note = phosphorothioate linkage
  modified_base 20..21: mod_base = OTHER; note = phosphorothioate linkage
  source 1..21: mol_type = other RNA
taaattcccagtggaaatgac

SEQ ID NO: 612 - RNA, 21 nt, synthetic construct
  misc_feature 1..21: note = siRNA sequence name:ETXS331
  modified_base 1: mod_base = OTHER; note = 2'O-methyl-adenosine
  modified_base 2: mod_base = OTHER; note = 2'O-methyl-adenosine
  modified_base 3: mod_base = OTHER; note = 2'O-methyl-cytidine
  modified_base 4: mod_base = OTHER; note = 2'O-methyl-cytidine
  modified_base 5: mod_base = OTHER; note = 2'O-methyl-adenosine
  modified_base 6: mod_base = OTHER; note = 2'O-methyl-cytidine
  modified_base 7: mod_base = OTHER; note = 2'Fluoro-adenosine
  modified_base 8: mod_base = OTHER; note = 2'O-methyl-adenosine
  modified_base 9: mod_base = OTHER; note = 2' Fluoro-cytidine
  modified_base 10: mod_base = OTHER; note = 2' Fluoro-uridine
  modified_base 11: mod_base = OTHER; note = 2' Fluoro-uridine
  modified_base 12: mod_base = OTHER; note = 2'O-methyl-cytidine
  modified_base 13: mod_base = OTHER; note = 2'O-methyl-cytidine
  modified_base 14: mod_base = OTHER; note = 2'O-methyl-guanosine
  modified_base 15: mod_base = OTHER; note = 2'O-methyl-guanosine
  modified_base 16: mod_base = OTHER; note = 2'O-methyl-cytidine
  modified_base 17: mod_base = OTHER; note = 2'O-methyl-uridine
  modified_base 18: mod_base = OTHER; note = 2'O-methyl-guanosine
  modified_base 19: mod_base = OTHER; note = 2'O-methyl-adenosine
  modified_base 20: mod_base = OTHER; note = 2'O-methyl-adenosine
  modified_base 21: mod_base = OTHER; note = 2'O-methyl-uridine
  modified_base 1..2: mod_base = OTHER; note = phosphorothioate linkage
  modified_base 2..3: mod_base = OTHER; note = phosphorothioate linkage
  modified_base 19..20: mod_base = OTHER; note = phosphorothioate linkage
  modified_base 20..21: mod_base = OTHER; note = phosphorothioate linkage
  source 1..21: mol_type = other RNA
aaccacaacttccggctgaat

SEQ ID NO: 613 - RNA, 21 nt, synthetic construct
  misc_feature 1..21: note = siRNA sequence name:ETXS333
  modified_base 1: mod_base = OTHER; note = 2'O-methyl-guanosine
  modified_base 2: mod_base = OTHER; note = 2'O-methyl-guanosine
  modified_base 3: mod_base = OTHER; note = 2'O-methyl-adenosine
  modified_base 4: mod_base = OTHER; note = 2'O-methyl-guanosine
  modified_base 5: mod_base = OTHER; note = 2'O-methyl-adenosine
  modified_base 6: mod_base = OTHER; note = 2'O-methyl-adenosine
  modified_base 7: mod_base = OTHER; note = 2' Fluoro-uridine
  modified_base 8: mod_base = OTHER; note = 2'O-methyl-adenosine
  modified_base 9: mod_base = OTHER; note = 2' Fluoro-uridine
  modified_base 10: mod_base = OTHER; note = 2'Fluoro-adenosine
  modified_base 11: mod_base = OTHER; note = 2' Fluoro-guanosine
  modified_base 12: mod_base = OTHER; note = 2'O-methyl-adenosine
  modified_base 13: mod_base = OTHER; note = 2'O-methyl-cytidine
  modified_base 14: mod_base = OTHER; note = 2'O-methyl-cytidine
  modified_base 15: mod_base = OTHER; note = 2'O-methyl-cytidine
  modified_base 16: mod_base = OTHER; note = 2'O-methyl-uridine
  modified_base 17: mod_base = OTHER; note = 2'O-methyl-guanosine
  modified_base 18: mod_base = OTHER; note = 2'O-methyl-cytidine
  modified_base 19: mod_base = OTHER; note = 2'O-methyl-uridine
  modified_base 20: mod_base = OTHER; note = 2'O-methyl-adenosine
  modified_base 21: mod_base = OTHER; note = 2'O-methyl-cytidine
  modified_base 1..2: mod_base = OTHER; note = phosphorothioate linkage
  modified_base 2..3: mod_base = OTHER; note = phosphorothioate linkage
  modified_base 19..20: mod_base = OTHER; note = phosphorothioate linkage
  modified_base 20..21: mod_base = OTHER; note = phosphorothioate linkage
  source 1..21: mol_type = other RNA
ggagaatatagaccctgctac

SEQ ID NO: 614 - RNA, 21 nt, synthetic construct
  misc_feature 1..21: note = siRNA sequence name:ETXS335
  modified_base 1: mod_base = OTHER; note = 2'O-methyl-cytidine
  modified_base 2: mod_base = OTHER; note = 2'O-methyl-cytidine
  modified_base 3: mod_base = OTHER; note = 2'O-methyl-adenosine
  modified_base 4: mod_base = OTHER; note = 2'O-methyl-uridine
  modified_base 5: mod_base = OTHER; note = 2'O-methyl-cytidine
  modified_base 6: mod_base = OTHER; note = 2'O-methyl-guanosine
  modified_base 7: mod_base = OTHER; note = 2'Fluoro-adenosine
  modified_base 8: mod_base = OTHER; note = 2'O-methyl-cytidine
  modified_base 9: mod_base = OTHER; note = 2' Fluoro-cytidine
  modified_base 10: mod_base = OTHER; note = 2' Fluoro-uridine
  modified_base 11: mod_base = OTHER; note = 2' Fluoro-guanosine
  modified_base 12: mod_base = OTHER; note = 2'O-methyl-uridine
  modified_base 13: mod_base = OTHER; note = 2'O-methyl-uridine
  modified_base 14: mod_base = OTHER; note = 2'O-methyl-cytidine
  modified_base 15: mod_base = OTHER; note = 2'O-methyl-adenosine
  modified_base 16: mod_base = OTHER; note = 2'O-methyl-adenosine
  modified_base 17: mod_base = OTHER; note = 2'O-methyl-guanosine
  modified_base 18: mod_base = OTHER; note = 2'O-methyl-cytidine
  modified_base 19: mod_base = OTHER; note = 2'O-methyl-adenosine
  modified_base 20: mod_base = OTHER; note = 2'O-methyl-cytidine
  modified_base 21: mod_base = OTHER; note = 2'O-methyl-cytidine
  modified_base 1..2: mod_base = OTHER; note = phosphorothioate linkage
  modified_base 2..3: mod_base = OTHER; note = phosphorothioate linkage
  modified_base 19..20: mod_base = OTHER; note = phosphorothioate linkage
  modified_base 20..21: mod_base = OTHER; note = phosphorothioate linkage
  source 1..21: mol_type = other RNA
ccatcgacctgttcaagcacc

SEQ ID NO: 615 - RNA, 21 nt, synthetic construct
  misc_feature 1..21: note = siRNA sequence name:ETXS337
  modified_base 1: mod_base = OTHER; note = 2'O-methyl-uridine
  modified_base 2: mod_base = OTHER; note = 2'O-methyl-uridine
  modified_base 3: mod_base = OTHER; note = 2'O-methyl-cytidine
  modified_base 4: mod_base = OTHER; note = 2'O-methyl-uridine
  modified_base 5: mod_base = OTHER; note = 2'O-methyl-cytidine
  modified_base 6: mod_base = OTHER; note = 2'O-methyl-adenosine
  modified_base 7: mod_base = OTHER; note = 2'Fluoro-adenosine
  modified_base 8: mod_base = OTHER; note = 2'O-methyl-cytidine
  modified_base 9: mod_base = OTHER; note = 2' Fluoro-uridine
  modified_base 10: mod_base = OTHER; note = 2' Fluoro-guanosine
  modified_base 11: mod_base = OTHER; note = 2' Fluoro-cytidine
  modified_base 12: mod_base = OTHER; note = 2'O-methyl-adenosine
  modified_base 13: mod_base = OTHER; note = 2'O-methyl-uridine
  modified_base 14: mod_base = OTHER; note = 2'O-methyl-cytidine
  modified_base 15: mod_base = OTHER; note = 2'O-methyl-uridine
  modified_base 16: mod_base = OTHER; note = 2'O-methyl-adenosine
  modified_base 17: mod_base = OTHER; note = 2'O-methyl-cytidine
  modified_base 18: mod_base = OTHER; note = 2'O-methyl-uridine
  modified_base 19: mod_base = OTHER; note = 2'O-methyl-uridine
  modified_base 20: mod_base = OTHER; note = 2'O-methyl-cytidine
  modified_base 21: mod_base = OTHER; note = 2'O-methyl-adenosine
  modified_base 1..2: mod_base = OTHER; note = phosphorothioate linkage
  modified_base 2..3: mod_base = OTHER; note = phosphorothioate linkage
  modified_base 19..20: mod_base = OTHER; note = phosphorothioate linkage
  modified_base 20..21: mod_base = OTHER; note = phosphorothioate linkage
  source 1..21: mol_type = other RNA
ttctcaactgcatctacttca

SEQ ID NO: 616 - RNA, 21 nt, synthetic construct
  misc_feature 1..21: note = siRNA sequence name:ETXS339
  modified_base 1: mod_base = OTHER; note = 2'O-methyl-uridine
  modified_base 2: mod_base = OTHER; note = 2'O-methyl-cytidine
  modified_base 3: mod_base = OTHER; note = 2'O-methyl-cytidine
  modified_base 4: mod_base = OTHER; note = 2'O-methyl-adenosine
  modified_base 5: mod_base = OTHER; note = 2'O-methyl-guanosine
  modified_base 6: mod_base = OTHER; note = 2'O-methyl-cytidine
  modified_base 7: mod_base = OTHER; note = 2' Fluoro-guanosine
  modified_base 8: mod_base = OTHER; note = 2'O-methyl-uridine
  modified_base 9: mod_base = OTHER; note = 2' Fluoro-cytidine
  modified_base 10: mod_base = OTHER; note = 2' Fluoro-uridine
  modified_base 11: mod_base = OTHER; note = 2' Fluoro-uridine
  modified_base 12: mod_base = OTHER; note = 2'O-methyl-adenosine
  modified_base 13: mod_base = OTHER; note = 2'O-methyl-adenosine
  modified_base 14: mod_base = OTHER; note = 2'O-methyl-cytidine
  modified_base 15: mod_base = OTHER; note = 2'O-methyl-adenosine
  modified_base 16: mod_base = OTHER; note = 2'O-methyl-uridine
  modified_base 17: mod_base = OTHER; note = 2'O-methyl-cytidine
  modified_base 18: mod_base = OTHER; note = 2'O-methyl-cytidine
  modified_base 19: mod_base = OTHER; note = 2'O-methyl-uridine
  modified_base 20: mod_base = OTHER; note = 2'O-methyl-cytidine
  modified_base 21: mod_base = OTHER; note = 2'O-methyl-adenosine
  modified_base 1..2: mod_base = OTHER; note = phosphorothioate linkage
  modified_base 2..3: mod_base = OTHER; note = phosphorothioate linkage
  modified_base 19..20: mod_base = OTHER; note = phosphorothioate linkage
  modified_base 20..21: mod_base = OTHER; note = phosphorothioate linkage
  source 1..21: mol_type = other RNA
tccagcgtcttaacatcctca

SEQ ID NO: 617 - RNA, 21 nt, synthetic construct
  misc_feature 1..21: note = siRNA sequence name:ETXS341
  modified_base 1: mod_base = OTHER; note = 2'O-methyl-adenosine
  modified_base 2: mod_base = OTHER; note = 2'O-methyl-guanosine
  modified_base 3: mod_base = OTHER; note = 2'O-methyl-guanosine
  modified_base 4: mod_base = OTHER; note = 2'O-methyl-cytidine
  modified_base 5: mod_base = OTHER; note = 2'O-methyl-adenosine
  modified_base 6: mod_base = OTHER; note = 2'O-methyl-uridine
  modified_base 7: mod_base = OTHER; note = 2' Fluoro-cytidine
  modified_base 8: mod_base = OTHER; note = 2'O-methyl-uridine
  modified_base 9: mod_base = OTHER; note = 2' Fluoro-cytidine
  modified_base 10: mod_base = OTHER; note = 2'Fluoro-adenosine
  modified_base 11: mod_base = OTHER; note = 2' Fluoro-guanosine
  modified_base 12: mod_base = OTHER; note = 2'O-methyl-adenosine
  modified_base 13: mod_base = OTHER; note = 2'O-methyl-cytidine
  modified_base 14: mod_base = OTHER; note = 2'O-methyl-cytidine
  modified_base 15: mod_base = OTHER; note = 2'O-methyl-adenosine
  modified_base 16: mod_base = OTHER; note = 2'O-methyl-adenosine
  modified_base 17: mod_base = OTHER; note = 2'O-methyl-adenosine
  modified_base 18: mod_base = OTHER; note = 2'O-methyl-guanosine
  modified_base 19: mod_base = OTHER; note = 2'O-methyl-guanosine
  modified_base 20: mod_base = OTHER; note = 2'O-methyl-adenosine
  modified_base 21: mod_base = OTHER; note = 2'O-methyl-uridine
  modified_base 1..2: mod_base = OTHER; note = phosphorothioate linkage
  modified_base 2..3: mod_base = OTHER; note = phosphorothioate linkage
  modified_base 19..20: mod_base = OTHER; note = phosphorothioate linkage
  modified_base 20..21: mod_base = OTHER; note = phosphorothioate linkage
  source 1..21: mol_type = other RNA
aggcatctcagaccaaaggat

SEQ ID NO: 618 - RNA, 21 nt, synthetic construct
  misc_feature 1..21: note = siRNA sequence name:ETXS343
  modified_base 1: mod_base = OTHER; note = 2'O-methyl-guanosine
  modified_base 2: mod_base = OTHER; note = 2'O-methyl-cytidine
  modified_base 3: mod_base = OTHER; note = 2'O-methyl-cytidine
  modified_base 4: mod_base = OTHER; note = 2'O-methyl-guanosine
  modified_base 5: mod_base = OTHER; note = 2'O-methyl-cytidine
  modified_base 6: mod_base = OTHER; note = 2'O-methyl-uridine
  modified_base 7: mod_base = OTHER; note = 2' Fluoro-guanosine
  modified_base 8: mod_base = OTHER; note = 2'O-methyl-uridine
  modified_base 9: mod_base = OTHER; note = 2' Fluoro-cytidine
  modified_base 10: mod_base = OTHER; note = 2' Fluoro-cytidine
  modified_base 11: mod_base = OTHER; note = 2'Fluoro-adenosine
  modified_base 12: mod_base = OTHER; note = 2'O-methyl-cytidine
  modified_base 13: mod_base = OTHER; note = 2'O-methyl-cytidine
  modified_base 14: mod_base = OTHER; note = 2'O-methyl-cytidine
  modified_base 15: mod_base = OTHER; note = 2'O-methyl-adenosine
  modified_base 16: mod_base = OTHER; note = 2'O-methyl-adenosine
  modified_base 17: mod_base = OTHER; note = 2'O-methyl-guanosine
  modified_base 18: mod_base = OTHER; note = 2'O-methyl-uridine
  modified_base 19: mod_base = OTHER; note = 2'O-methyl-cytidine
  modified_base 20: mod_base = OTHER; note = 2'O-methyl-cytidine
  modified_base 21: mod_base = OTHER; note = 2'O-methyl-guanosine
  modified_base 1..2: mod_base = OTHER; note = phosphorothioate linkage
  modified_base 2..3: mod_base = OTHER; note = phosphorothioate linkage
  modified_base 19..20: mod_base = OTHER; note = phosphorothioate linkage
  modified_base 20..21: mod_base = OTHER; note = phosphorothioate linkage
  source 1..21: mol_type = other RNA
gccgctgtccacccaagtccg

SEQ ID NO: 619 - RNA, 21 nt, synthetic construct
  misc_feature 1..21: note = siRNA sequence name:ETXS345
  modified_base 1: mod_base = OTHER; note = 2'O-methyl-adenosine
  modified_base 2: mod_base = OTHER; note = 2'O-methyl-uridine
  modified_base 3: mod_base = OTHER; note = 2'O-methyl-guanosine
  modified_base 4: mod_base = OTHER; note = 2'O-methyl-adenosine
  modified_base 5: mod_base = OTHER; note = 2'O-methyl-cytidine
  modified_base 6: mod_base = OTHER; note = 2'O-methyl-adenosine
  modified_base 7: mod_base = OTHER; note = 2'Fluoro-adenosine
  modified_base 8: mod_base = OTHER; note = 2'O-methyl-adenosine
  modified_base 9: mod_base = OTHER; note = 2' Fluoro-cytidine
  modified_base 10: mod_base = OTHER; note = 2'Fluoro-adenosine
  modified_base 11: mod_base = OTHER; note = 2' Fluoro-guanosine
  modified_base 12: mod_base = OTHER; note = 2'O-methyl-adenosine
  modified_base 13: mod_base = OTHER; note = 2'O-methyl-adenosine
  modified_base 14: mod_base = OTHER; note = 2'O-methyl-cytidine
  modified_base 15: mod_base = OTHER; note = 2'O-methyl-uridine
  modified_base 16: mod_base = OTHER; note = 2'O-methyl-cytidine
  modified_base 17: mod_base = OTHER; note = 2'O-methyl-guanosine
  modified_base 18: mod_base = OTHER; note = 2'O-methyl-adenosine
  modified_base 19: mod_base = OTHER; note = 2'O-methyl-guanosine
  modified_base 20: mod_base = OTHER; note = 2'O-methyl-adenosine
  modified_base 21: mod_base = OTHER; note = 2'O-methyl-adenosine
  modified_base 1..2: mod_base = OTHER; note = phosphorothioate linkage
  modified_base 2..3: mod_base = OTHER; note = phosphorothioate linkage
  modified_base 19..20: mod_base = OTHER; note = phosphorothioate linkage
  modified_base 20..21: mod_base = OTHER; note = phosphorothioate linkage
  source 1..21: mol_type = other RNA
atgacaaacagaactcgagaa

SEQ ID NO: 620 - RNA, 21 nt, synthetic construct
  misc_feature 1..21: note = siRNA sequence name:ETXS347
  modified_base 1: mod_base = OTHER; note = 2'O-methyl-guanosine
  modified_base 2: mod_base = OTHER; note = 2'O-methyl-guanosine
  modified_base 3: mod_base = OTHER; note = 2'O-methyl-guanosine
  modified_base 4: mod_base = OTHER; note = 2'O-methyl-guanosine
  modified_base 5: mod_base = OTHER; note = 2'O-methyl-uridine
  modified_base 6: mod_base = OTHER; note = 2'O-methyl-uridine
  modified_base 7: mod_base = OTHER; note = 2' Fluoro-cytidine
  modified_base 8: mod_base = OTHER; note = 2'O-methyl-adenosine
  modified_base 9: mod_base = OTHER; note = 2' Fluoro-uridine
  modified_base 10: mod_base = OTHER; note = 2' Fluoro-guanosine
  modified_base 11: mod_base = OTHER; note = 2' Fluoro-cytidine
  modified_base 12: mod_base = OTHER; note = 2'O-methyl-cytidine
  modified_base 13: mod_base = OTHER; note = 2'O-methyl-guanosine
  modified_base 14: mod_base = OTHER; note = 2'O-methyl-cytidine
  modified_base 15: mod_base = OTHER; note = 2'O-methyl-uridine
  modified_base 16: mod_base = OTHER; note = 2'O-methyl-guanosine
  modified_base 17: mod_base = OTHER; note = 2'O-methyl-uridine
  modified_base 18: mod_base = OTHER; note = 2'O-methyl-cytidine
  modified_base 19: mod_base = OTHER; note = 2'O-methyl-cytidine
  modified_base 20: mod_base = OTHER; note = 2'O-methyl-adenosine
  modified_base 21: mod_base = OTHER; note = 2'O-methyl-cytidine
  modified_base 1..2: mod_base = OTHER; note = phosphorothioate linkage
  modified_base 2..3: mod_base = OTHER; note = phosphorothioate linkage
  modified_base 19..20: mod_base = OTHER; note = phosphorothioate linkage
  modified_base 20..21: mod_base = OTHER; note = phosphorothioate linkage
  source 1..21: mol_type = other RNA
ggggttcatgccgctgtccac

SEQ ID NO: 621 - RNA, 21 nt, synthetic construct
  misc_feature 1..21: note = siRNA sequence name:ETXS349
  modified_base 1: mod_base = OTHER; note = 2'O-methyl-guanosine
  modified_base 2: mod_base = OTHER; note = 2'O-methyl-adenosine
  modified_base 3: mod_base = OTHER; note = 2'O-methyl-uridine
  modified_base 4: mod_base = OTHER; note = 2'O-methyl-cytidine
  modified_base 5: mod_base = OTHER; note = 2'O-methyl-cytidine
  modified_base 6: mod_base = OTHER; note = 2'O-methyl-adenosine
  modified_base 7: mod_base = OTHER; note = 2' Fluoro-guanosine
  modified_base 8: mod_base = OTHER; note = 2'O-methyl-cytidine
  modified_base 9: mod_base = OTHER; note = 2' Fluoro-guanosine
  modified_base 10: mod_base = OTHER; note = 2' Fluoro-uridine
  modified_base 11: mod_base = OTHER; note = 2' Fluoro-cytidine
  modified_base 12: mod_base = OTHER; note = 2'O-methyl-uridine
  modified_base 13: mod_base = OTHER; note = 2'O-methyl-uridine
  modified_base 14: mod_base = OTHER; note = 2'O-methyl-adenosine
  modified_base 15: mod_base = OTHER; note = 2'O-methyl-adenosine
  modified_base 16: mod_base = OTHER; note = 2'O-methyl-cytidine
  modified_base 17: mod_base = OTHER; note = 2'O-methyl-adenosine
  modified_base 18: mod_base = OTHER; note = 2'O-methyl-uridine
  modified_base 19: mod_base = OTHER; note = 2'O-methyl-cytidine
  modified_base 20: mod_base = OTHER; note = 2'O-methyl-cytidine
  modified_base 21: mod_base = OTHER; note = 2'O-methyl-uridine
  modified_base 1..2: mod_base = OTHER; note = phosphorothioate linkage
  modified_base 2..3: mod_base = OTHER; note = phosphorothioate linkage
  modified_base 19..20: mod_base = OTHER; note = phosphorothioate linkage
  modified_base 20..21: mod_base = OTHER; note = phosphorothioate linkage
  source 1..21: mol_type = other RNA
gatccagcgtcttaacatcct

SEQ ID NO: 622 - RNA, 21 nt, synthetic construct
  misc_feature 1..21: note = siRNA sequence name:ETXS351
  modified_base 1: mod_base = OTHER; note = 2'O-methyl-cytidine
  modified_base 2: mod_base = OTHER; note = 2'O-methyl-cytidine
  modified_base 3: mod_base = OTHER; note = 2'O-methyl-cytidine
  modified_base 4: mod_base = OTHER; note = 2'O-methyl-adenosine
  modified_base 5: mod_base = OTHER; note = 2'O-methyl-adenosine
  modified_base 6: mod_base = OTHER; note = 2'O-methyl-guanosine
  modified_base 7: mod_base = OTHER; note = 2' Fluoro-uridine
  modified_base 8: mod_base = OTHER; note = 2'O-methyl-cytidine
  modified_base 9: mod_base = OTHER; note = 2' Fluoro-cytidine
  modified_base 10: mod_base = OTHER; note = 2' Fluoro-guanosine
  modified_base 11: mod_base = OTHER; note = 2' Fluoro-cytidine
  modified_base 12: mod_base = OTHER; note = 2'O-methyl-uridine
  modified_base 13: mod_base = OTHER; note = 2'O-methyl-uridine
  modified_base 14: mod_base = OTHER; note = 2'O-methyl-cytidine
  modified_base 15: mod_base = OTHER; note = 2'O-methyl-adenosine
  modified_base 16: mod_base = OTHER; note = 2'O-methyl-cytidine
  modified_base 17: mod_base = OTHER; note = 2'O-methyl-uridine
  modified_base 18: mod_base = OTHER; note = 2'O-methyl-guanosine
  modified_base 19: mod_base = OTHER; note = 2'O-methyl-uridine
  modified_base 20: mod_base = OTHER; note = 2'O-methyl-cytidine
  modified_base 21: mod_base = OTHER; note = 2'O-methyl-guanosine
  modified_base 1..2: mod_base = OTHER; note = phosphorothioate linkage
  modified_base 2..3: mod_base = OTHER; note = phosphorothioate linkage
  modified_base 19..20: mod_base = OTHER; note = phosphorothioate linkage
  modified_base 20..21: mod_base = OTHER; note = phosphorothioate linkage
  source 1..21: mol_type = other RNA
cccaagtccgcttcactgtcg

SEQ ID NO: 623 - RNA, 21 nt, synthetic construct
  misc_feature 1..21: note = siRNA sequence name:ETXS353
  modified_base 1: mod_base = OTHER; note = 2'O-methyl-adenosine
  modified_base 2: mod_base = OTHER; note = 2'O-methyl-cytidine
  modified_base 3: mod_base = OTHER; note = 2'O-methyl-uridine
  modified_base 4: mod_base = OTHER; note = 2'O-methyl-uridine
  modified_base 5: mod_base = OTHER; note = 2'O-methyl-cytidine
  modified_base 6: mod_base = OTHER; note = 2'O-methyl-cytidine
  modified_base 7: mod_base = OTHER; note = 2' Fluoro-guanosine
  modified_base 8: mod_base = OTHER; note = 2'O-methyl-guanosine
  modified_base 9: mod_base = OTHER; note = 2' Fluoro-cytidine
  modified_base 10: mod_base = OTHER; note = 2' Fluoro-uridine
  modified_base 11: mod_base = OTHER; note = 2' Fluoro-guanosine
  modified_base 12: mod_base = OTHER; note = 2'O-methyl-adenosine
  modified_base 13: mod_base = OTHER; note = 2'O-methyl-adenosine
  modified_base 14: mod_base = OTHER; note = 2'O-methyl-uridine
  modified_base 15: mod_base = OTHER; note = 2'O-methyl-guanosine
  modified_base 16: mod_base = OTHER; note = 2'O-methyl-adenosine
  modified_base 17: mod_base = OTHER; note = 2'O-methyl-guanosine
  modified_base 18: mod_base = OTHER; note = 2'O-methyl-adenosine
  modified_base 19: mod_base = OTHER; note = 2'O-methyl-guanosine
  modified_base 20: mod_base = OTHER; note = 2'O-methyl-adenosine
  modified_base 21: mod_base = OTHER; note = 2'O-methyl-guanosine
  modified_base 1..2: mod_base = OTHER; note = phosphorothioate linkage
  modified_base 2..3: mod_base = OTHER; note = phosphorothioate linkage
  modified_base 19..20: mod_base = OTHER; note = phosphorothioate linkage
  modified_base 20..21: mod_base = OTHER; note = phosphorothioate linkage
  source 1..21: mol_type = other RNA
acttccggctgaatgagagag

SEQ ID NO: 624 - RNA, 21 nt, synthetic construct
  misc_feature 1..21: note = siRNA sequence name:ETXS355
  modified_base 1: mod_base = OTHER; note = 2'O-methyl-uridine
  modified_base 2: mod_base = OTHER; note = 2'O-methyl-adenosine
  modified_base 3: mod_base = OTHER; note = 2'O-methyl-uridine
  modified_base 4: mod_base = OTHER; note = 2'O-methyl-uridine
  modified_base 5: mod_base = OTHER; note = 2'O-methyl-adenosine
  modified_base 6: mod_base = OTHER; note = 2'O-methyl-cytidine
  modified_base 7: mod_base = OTHER; note = 2' Fluoro-uridine
  modified_base 8: mod_base = OTHER; note = 2'O-methyl-uridine
  modified_base 9: mod_base = OTHER; note = 2' Fluoro-uridine
  modified_base 10: mod_base = OTHER; note = 2' Fluoro-guanosine
  modified_base 11: mod_base = OTHER; note = 2' Fluoro-cytidine
  modified_base 12: mod_base = OTHER; note = 2'O-methyl-uridine
  modified_base 13: mod_base = OTHER; note = 2'O-methyl-guanosine
  modified_base 14: mod_base = OTHER; note = 2'O-methyl-adenosine
  modified_base 15: mod_base = OTHER; note = 2'O-methyl-guanosine
  modified_base 16: mod_base = OTHER; note = 2'O-methyl-guanosine
  modified_base 17: mod_base = OTHER; note = 2'O-methyl-cytidine
  modified_base 18: mod_base = OTHER; note = 2'O-methyl-cytidine
  modified_base 19: mod_base = OTHER; note = 2'O-methyl-cytidine
  modified_base 20: mod_base = OTHER; note = 2'O-methyl-adenosine
  modified_base 21: mod_base = OTHER; note = 2'O-methyl-guanosine
  modified_base 1..2: mod_base = OTHER; note = phosphorothioate linkage
  modified_base 2..3: mod_base = OTHER; note = phosphorothioate linkage
  modified_base 19..20: mod_base = OTHER; note = phosphorothioate linkage
  modified_base 20..21: mod_base = OTHER; note = phosphorothioate linkage
  source 1..21: mol_type = other RNA
tattactttgctgaggcccag

SEQ ID NO: 625 - RNA, 21 nt, synthetic construct
  misc_feature 1..21: note = siRNA sequence name:ETXS357
  modified_base 1: mod_base = OTHER; note = 2'O-methyl-cytidine
  modified_base 2: mod_base = OTHER; note = 2'O-methyl-uridine
  modified_base 3: mod_base = OTHER; note = 2'O-methyl-guanosine
  modified_base 4: mod_base = OTHER; note = 2'O-methyl-guanosine
  modified_base 5: mod_base = OTHER; note = 2'O-methyl-adenosine
  modified_base 6: mod_base = OTHER; note = 2'O-methyl-guanosine
  modified_base 7: mod_base = OTHER; note = 2'Fluoro-adenosine
  modified_base 8: mod_base = OTHER; note = 2'O-methyl-adenosine
  modified_base 9: mod_base = OTHER; note = 2' Fluoro-uridine
  modified_base 10: mod_base = OTHER; note = 2'Fluoro-adenosine
  modified_base 11: mod_base = OTHER; note = 2' Fluoro-uridine
  modified_base 12: mod_base = OTHER; note = 2'O-methyl-adenosine
  modified_base 13: mod_base = OTHER; note = 2'O-methyl-guanosine
  modified_base 14: mod_base = OTHER; note = 2'O-methyl-adenosine
  modified_base 15: mod_base = OTHER; note = 2'O-methyl-cytidine
  modified_base 16: mod_base = OTHER; note = 2'O-methyl-cytidine
  modified_base 17: mod_base = OTHER; note = 2'O-methyl-cytidine
  modified_base 18: mod_base = OTHER; note = 2'O-methyl-uridine
  modified_base 19: mod_base = OTHER; note = 2'O-methyl-guanosine
  modified_base 20: mod_base = OTHER; note = 2'O-methyl-cytidine
  modified_base 21: mod_base = OTHER; note = 2'O-methyl-uridine
  modified_base 1..2: mod_base = OTHER; note = phosphorothioate linkage
  modified_base 2..3: mod_base = OTHER; note = phosphorothioate linkage
  modified_base 19..20: mod_base = OTHER; note = phosphorothioate linkage
  modified_base 20..21: mod_base = OTHER; note = phosphorothioate linkage
  source 1..21: mol_type = other RNA
ctggagaatatagaccctgct

SEQ ID NO: 626 - RNA, 21 nt, synthetic construct
  misc_feature 1..21: note = siRNA sequence name:ETXS359
  modified_base 1: mod_base = OTHER; note = 2'O-methyl-uridine
  modified_base 2: mod_base = OTHER; note = 2'O-methyl-guanosine
  modified_base 3: mod_base = OTHER; note = 2'O-methyl-adenosine
  modified_base 4: mod_base = OTHER; note = 2'O-methyl-uridine
  modified_base 5: mod_base = OTHER; note = 2'O-methyl-uridine
  modified_base 6: mod_base = OTHER; note = 2'O-methyl-cytidine
  modified_base 7: mod_base = OTHER; note = 2' Fluoro-uridine
  modified_base 8: mod_base = OTHER; note = 2'O-methyl-cytidine
  modified_base 9: mod_base = OTHER; note = 2'Fluoro-adenosine
  modified_base 10: mod_base = OTHER; note = 2'Fluoro-adenosine
  modified_base 11: mod_base = OTHER; note = 2' Fluoro-cytidine
  modified_base 12: mod_base = OTHER; note = 2'O-methyl-uridine
  modified_base 13: mod_base = OTHER; note = 2'O-methyl-guanosine
  modified_base 14: mod_base = OTHER; note = 2'O-methyl-cytidine
  modified_base 15: mod_base = OTHER; note = 2'O-methyl-adenosine
  modified_base 16: mod_base = OTHER; note = 2'O-methyl-uridine
  modified_base 17: mod_base = OTHER; note = 2'O-methyl-cytidine
  modified_base 18: mod_base = OTHER; note = 2'O-methyl-uridine
  modified_base 19: mod_base = OTHER; note = 2'O-methyl-adenosine
  modified_base 20: mod_base = OTHER; note = 2'O-methyl-cytidine
  modified_base 21: mod_base = OTHER; note = 2'O-methyl-uridine
  modified_base 1..2: mod_base = OTHER; note = phosphorothioate linkage
  modified_base 2..3: mod_base = OTHER; note = phosphorothioate linkage
  modified_base 19..20: mod_base = OTHER; note = phosphorothioate linkage
  modified_base 20..21: mod_base = OTHER; note = phosphorothioate linkage
  source 1..21: mol_type = other RNA
tgattctcaactgcatctact

SEQ ID NO: 627 - RNA, 21 nt, synthetic construct
  misc_feature 1..21: note = siRNA sequence name:ETXS361
  modified_base 1: mod_base = OTHER; note = 2'O-methyl-uridine
  modified_base 2: mod_base = OTHER; note = 2'O-methyl-guanosine
  modified_base 3: mod_base = OTHER; note = 2'O-methyl-cytidine
  modified_base 4: mod_base = OTHER; note = 2'O-methyl-cytidine
  modified_base 5: mod_base = OTHER; note = 2'O-methyl-guanosine
  modified_base 6: mod_base = OTHER; note = 2'O-methyl-cytidine
  modified_base 7: mod_base = OTHER; note = 2' Fluoro-uridine
  modified_base 8: mod_base = OTHER; note = 2'O-methyl-guanosine
  modified_base 9: mod_base = OTHER; note = 2' Fluoro-uridine
  modified_base 10: mod_base = OTHER; note = 2' Fluoro-cytidine
  modified_base 11: mod_base = OTHER; note = 2' Fluoro-cytidine
  modified_base 12: mod_base = OTHER; note = 2'O-methyl-adenosine
  modified_base 13: mod_base = OTHER; note = 2'O-methyl-cytidine
  modified_base 14: mod_base = OTHER; note = 2'O-methyl-cytidine
  modified_base 15: mod_base = OTHER; note = 2'O-methyl-cytidine
  modified_base 16: mod_base = OTHER; note = 2'O-methyl-adenosine
  modified_base 17: mod_base = OTHER; note = 2'O-methyl-adenosine
  modified_base 18: mod_base = OTHER; note = 2'O-methyl-guanosine
  modified_base 19: mod_base = OTHER; note = 2'O-methyl-uridine
  modified_base 20: mod_base = OTHER; note = 2'O-methyl-cytidine
  modified_base 21: mod_base = OTHER; note = 2'O-methyl-cytidine
  modified_base 1..2: mod_base = OTHER; note = phosphorothioate linkage
  modified_base 2..3: mod_base = OTHER; note = phosphorothioate linkage
  modified_base 19..20: mod_base = OTHER; note = phosphorothioate linkage
  modified_base 20..21: mod_base = OTHER; note = phosphorothioate linkage
  source 1..21: mol_type = other RNA
tgccgctgtccacccaagtcc

SEQ ID NO: 628 - RNA, 21 nt, synthetic construct
  misc_feature 1..21: note = siRNA sequence name:ETXS363
  modified_base 1: mod_base = OTHER; note = 2'O-methyl-cytidine
  modified_base 2: mod_base = OTHER; note = 2'O-methyl-uridine
  modified_base 3: mod_base = OTHER; note = 2'O-methyl-cytidine
  modified_base 4: mod_base = OTHER; note = 2'O-methyl-adenosine
  modified_base 5: mod_base = OTHER; note = 2'O-methyl-adenosine
  modified_base 6: mod_base = OTHER; note = 2'O-methyl-cytidine
  modified_base 7: mod_base = OTHER; note = 2' Fluoro-uridine
  modified_base 8: mod_base = OTHER; note = 2'O-methyl-guanosine
  modified_base 9: mod_base = OTHER; note = 2' Fluoro-cytidine
  modified_base 10: mod_base = OTHER; note = 2'Fluoro-adenosine
  modified_base 11: mod_base = OTHER; note = 2' Fluoro-uridine
  modified_base 12: mod_base = OTHER; note = 2'O-methyl-cytidine
  modified_base 13: mod_base = OTHER; note = 2'O-methyl-uridine
  modified_base 14: mod_base = OTHER; note = 2'O-methyl-adenosine
  modified_base 15: mod_base = OTHER; note = 2'O-methyl-cytidine
  modified_base 16: mod_base = OTHER; note = 2'O-methyl-uridine
  modified_base 17: mod_base = OTHER; note = 2'O-methyl-uridine
  modified_base 18: mod_base = OTHER; note = 2'O-methyl-cytidine
  modified_base 19: mod_base = OTHER; note = 2'O-methyl-adenosine
  modified_base 20: mod_base = OTHER; note = 2'O-methyl-adenosine
  modified_base 21: mod_base = OTHER; note = 2'O-methyl-adenosine
  modified_base 1..2: mod_base = OTHER; note = phosphorothioate linkage
  modified_base 2..3: mod_base = OTHER; note = phosphorothioate linkage
  modified_base 19..20: mod_base = OTHER; note = phosphorothioate linkage
  modified_base 20..21: mod_base = OTHER; note = phosphorothioate linkage
  source 1..21: mol_type = other RNA
ctcaactgcatctacttcaaa

SEQ ID NO: 629 - RNA, 21 nt, synthetic construct
  misc_feature 1..21: note = siRNA sequence name:ETXS365
  modified_base 1: mod_base = OTHER; note = 2'O-methyl-adenosine
  modified_base 2: mod_base = OTHER; note = 2'O-methyl-cytidine
  modified_base 3: mod_base = OTHER; note = 2'O-methyl-cytidine
  modified_base 4: mod_base = OTHER; note = 2'O-methyl-adenosine
  modified_base 5: mod_base = OTHER; note = 2'O-methyl-cytidine
  modified_base 6: mod_base = OTHER; note = 2'O-methyl-adenosine
  modified_base 7: mod_base = OTHER; note = 2'Fluoro-adenosine
  modified_base 8: mod_base = OTHER; note = 2'O-methyl-cytidine
  modified_base 9: mod_base = OTHER; note = 2' Fluoro-uridine
  modified_base 10: mod_base = OTHER; note = 2' Fluoro-uridine
  modified_base 11: mod_base = OTHER; note = 2' Fluoro-cytidine
  modified_base 12: mod_base = OTHER; note = 2'O-methyl-cytidine
  modified_base 13: mod_base = OTHER; note = 2'O-methyl-guanosine
  modified_base 14: mod_base = OTHER; note = 2'O-methyl-guanosine
  modified_base 15: mod_base = OTHER; note = 2'O-methyl-cytidine
  modified_base 16: mod_base = OTHER; note = 2'O-methyl-uridine
  modified_base 17: mod_base = OTHER; note = 2'O-methyl-guanosine
  modified_base 18: mod_base = OTHER; note = 2'O-methyl-adenosine
  modified_base 19: mod_base = OTHER; note = 2'O-methyl-adenosine
  modified_base 20: mod_base = OTHER; note = 2'O-methyl-uridine
  modified_base 21: mod_base = OTHER; note = 2'O-methyl-guanosine
  modified_base 1..2: mod_base = OTHER; note = phosphorothioate linkage
  modified_base 2..3: mod_base = OTHER; note = phosphorothioate linkage
  modified_base 19..20: mod_base = OTHER; note = phosphorothioate linkage
  modified_base 20..21: mod_base = OTHER; note = phosphorothioate linkage
  source 1..21: mol_type = other RNA
accacaacttccggctgaatg

SEQ ID NO: 630 - RNA, 21 nt, synthetic construct
  misc_feature 1..21: note = siRNA sequence name:ETXS367
  modified_base 1: mod_base = OTHER; note = 2'O-methyl-cytidine
  modified_base 2: mod_base = OTHER; note = 2'O-methyl-guanosine
  modified_base 3: mod_base = OTHER; note = 2'O-methyl-guanosine
  modified_base 4: mod_base = OTHER; note = 2'O-methyl-uridine
  modified_base 5: mod_base = OTHER; note = 2'O-methyl-guanosine
  modified_base 6: mod_base = OTHER; note = 2'O-methyl-guanosine
  modified_base 7: mod_base = OTHER; note = 2' Fluoro-guanosine
  modified_base 8: mod_base = OTHER; note = 2'O-methyl-guanosine
  modified_base 9: mod_base = OTHER; note = 2' Fluoro-uridine
  modified_base 10: mod_base = OTHER; note = 2' Fluoro-uridine
  modified_base 11: mod_base = OTHER; note = 2' Fluoro-cytidine
  modified_base 12: mod_base = OTHER; note = 2'O-methyl-adenosine
  modified_base 13: mod_base = OTHER; note = 2'O-methyl-uridine
  modified_base 14: mod_base = OTHER; note = 2'O-methyl-guanosine
  modified_base 15: mod_base = OTHER; note = 2'O-methyl-cytidine
  modified_base 16: mod_base = OTHER; note = 2'O-methyl-cytidine
  modified_base 17: mod_base = OTHER; note = 2'O-methyl-guanosine
  modified_base 18: mod_base = OTHER; note = 2'O-methyl-cytidine
  modified_base 19: mod_base = OTHER; note = 2'O-methyl-uridine
  modified_base 20: mod_base = OTHER; note = 2'O-methyl-guanosine
  modified_base 21: mod_base = OTHER; note = 2'O-methyl-uridine
  modified_base 1..2: mod_base = OTHER; note = phosphorothioate linkage
  modified_base 2..3: mod_base = OTHER; note = phosphorothioate linkage
  modified_base 19..20: mod_base = OTHER; note = phosphorothioate linkage
  modified_base 20..21: mod_base = OTHER; note = phosphorothioate linkage
  source 1..21: mol_type = other RNA
cggtggggttcatgccgctgt

SEQ ID NO: 631 - RNA, 21 nt, synthetic construct
  misc_feature 1..21: note = siRNA sequence name:ETXS369
  modified_base 1: mod_base = OTHER; note = 2'O-methyl-uridine
  modified_base 2: mod_base = OTHER; note = 2'O-methyl-cytidine
  modified_base 3: mod_base = OTHER; note = 2'O-methyl-cytidine
  modified_base 4: mod_base = OTHER; note = 2'O-methyl-guanosine
  modified_base 5: mod_base = OTHER; note = 2'O-methyl-guanosine
  modified_base 6: mod_base = OTHER; note = 2'O-methyl-cytidine
  modified_base 7: mod_base = OTHER; note = 2' Fluoro-uridine
  modified_base 8: mod_base = OTHER; note = 2'O-methyl-guanosine
  modified_base 9: mod_base = OTHER; note = 2'Fluoro-adenosine
  modified_base 10: mod_base = OTHER; note = 2'Fluoro-adenosine
  modified_base 11: mod_base = OTHER; note = 2' Fluoro-uridine
  modified_base 12: mod_base = OTHER; note = 2'O-methyl-guanosine
  modified_base 13: mod_base = OTHER; note = 2'O-methyl-adenosine
  modified_base 14: mod_base = OTHER; note = 2'O-methyl-guanosine
  modified_base 15: mod_base = OTHER; note = 2'O-methyl-adenosine
  modified_base 16: mod_base = OTHER; note = 2'O-methyl-guanosine
  modified_base 17: mod_base = OTHER; note = 2'O-methyl-adenosine
  modified_base 18: mod_base = OTHER; note = 2'O-methyl-guanosine
  modified_base 19: mod_base = OTHER; note = 2'O-methyl-adenosine
  modified_base 20: mod_base = OTHER; note = 2'O-methyl-guanosine
  modified_base 21: mod_base = OTHER; note = 2'O-methyl-guanosine
  modified_base 1..2: mod_base = OTHER; note = phosphorothioate linkage
  modified_base 2..3: mod_base = OTHER; note = phosphorothioate linkage
  modified_base 19..20: mod_base = OTHER; note = phosphorothioate linkage
  modified_base 20..21: mod_base = OTHER; note = phosphorothioate linkage
  source 1..21: mol_type = other RNA
tccggctgaatgagagagagg

SEQ ID NO: 632 - RNA, 21 nt, synthetic construct
  misc_feature 1..21: note = siRNA sequence name:ETXS371
  modified_base 1: mod_base = OTHER; note = 2'O-methyl-uridine
  modified_base 2: mod_base = OTHER; note = 2'O-methyl-cytidine
  modified_base 3: mod_base = OTHER; note = 2'O-methyl-uridine
  modified_base 4: mod_base = OTHER; note = 2'O-methyl-uridine
  modified_base 5: mod_base = OTHER; note = 2'O-methyl-cytidine
  modified_base 6: mod_base = OTHER; note = 2'O-methyl-adenosine
  modified_base 7: mod_base = OTHER; note = 2' Fluoro-guanosine
  modified_base 8: mod_base = OTHER; note = 2'O-methyl-guanosine
  modified_base 9: mod_base = OTHER; note = 2'Fluoro-adenosine
  modified_base 10: mod_base = OTHER; note = 2' Fluoro-guanosine
  modified_base 11: mod_base = OTHER; note = 2' Fluoro-guanosine
  modified_base 12: mod_base = OTHER; note = 2'O-methyl-adenosine
  modified_base 13: mod_base = OTHER; note = 2'O-methyl-adenosine
  modified_base 14: mod_base = OTHER; note = 2'O-methyl-uridine
  modified_base 15: mod_base = OTHER; note = 2'O-methyl-uridine
  modified_base 16: mod_base = OTHER; note = 2'O-methyl-uridine
  modified_base 17: mod_base = OTHER; note = 2'O-methyl-uridine
  modified_base 18: mod_base = OTHER; note = 2'O-methyl-guanosine
  modified_base 19: mod_base = OTHER; note = 2'O-methyl-guanosine
  modified_base 20: mod_base = OTHER; note = 2'O-methyl-guanosine
  modified_base 21: mod_base = OTHER; note = 2'O-methyl-uridine
  modified_base 1..2: mod_base = OTHER; note = phosphorothioate linkage
  modified_base 2..3: mod_base = OTHER; note = phosphorothioate linkage
  modified_base 19..20: mod_base = OTHER; note = phosphorothioate linkage
  modified_base 20..21: mod_base = OTHER; note = phosphorothioate linkage
  source 1..21: mol_type = other RNA
tcttcaggaggaattttgggt

SEQ ID NO: 633 - RNA, 21 nt, synthetic construct
  misc_feature 1..21: note = siRNA sequence name:ETXS373
  modified_base 1: mod_base = OTHER; note = 2'O-methyl-guanosine
  modified_base 2: mod_base = OTHER; note = 2'O-methyl-uridine
  modified_base 3: mod_base = OTHER; note = 2'O-methyl-adenosine
  modified_base 4: mod_base = OTHER; note = 2'O-methyl-uridine
  modified_base 5: mod_base = OTHER; note = 2'O-methyl-uridine
  modified_base 6: mod_base = OTHER; note = 2'O-methyl-adenosine
  modified_base 7: mod_base = OTHER; note = 2' Fluoro-cytidine
  modified_base 8: mod_base = OTHER; note = 2'O-methyl-uridine
  modified_base 9: mod_base = OTHER; note = 2' Fluoro-uridine
  modified_base 10: mod_base = OTHER; note = 2' Fluoro-uridine
  modified_base 11: mod_base = OTHER; note = 2' Fluoro-guanosine
  modified_base 12: mod_base = OTHER; note = 2'O-methyl-cytidine
  modified_base 13: mod_base = OTHER; note = 2'O-methyl-uridine
  modified_base 14: mod_base = OTHER; note = 2'O-methyl-guanosine
  modified_base 15: mod_base = OTHER; note = 2'O-methyl-adenosine
  modified_base 16: mod_base = OTHER; note = 2'O-methyl-guanosine
  modified_base 17: mod_base = OTHER; note = 2'O-methyl-guanosine
  modified_base 18: mod_base = OTHER; note = 2'O-methyl-cytidine
  modified_base 19: mod_base = OTHER; note = 2'O-methyl-cytidine
  modified_base 20: mod_base = OTHER; note = 2'O-methyl-cytidine
  modified_base 21: mod_base = OTHER; note = 2'O-methyl-adenosine
  modified_base 1..2: mod_base = OTHER; note = phosphorothioate linkage
  modified_base 2..3: mod_base = OTHER; note = phosphorothioate linkage
  modified_base 19..20: mod_base = OTHER; note = phosphorothioate linkage
  modified_base 20..21: mod_base = OTHER; note = phosphorothioate linkage
  source 1..21: mol_type = other RNA
gtattactttgctgaggccca

SEQ ID NO: 634 - RNA, 21 nt, synthetic construct
  misc_feature 1..21: note = siRNA sequence name:ETXS375
  modified_base 1: mod_base = OTHER; note = 2'O-methyl-guanosine
  modified_base 2: mod_base = OTHER; note = 2'O-methyl-adenosine
  modified_base 3: mod_base = OTHER; note = 2'O-methyl-uridine
  modified_base 4: mod_base = OTHER; note = 2'O-methyl-uridine
  modified_base 5: mod_base = OTHER; note = 2'O-methyl-cytidine
  modified_base 6: mod_base = OTHER; note = 2'O-methyl-uridine
  modified_base 7: mod_base = OTHER; note = 2' Fluoro-cytidine
  modified_base 8: mod_base = OTHER; note = 2'O-methyl-adenosine
  modified_base 9: mod_base = OTHER; note = 2'Fluoro-adenosine
  modified_base 10: mod_base = OTHER; note = 2' Fluoro-cytidine
  modified_base 11: mod_base = OTHER; note = 2' Fluoro-uridine
  modified_base 12: mod_base = OTHER; note = 2'O-methyl-guanosine
  modified_base 13: mod_base = OTHER; note = 2'O-methyl-cytidine
  modified_base 14: mod_base = OTHER; note = 2'O-methyl-adenosine
  modified_base 15: mod_base = OTHER; note = 2'O-methyl-uridine
  modified_base 16: mod_base = OTHER; note = 2'O-methyl-cytidine
  modified_base 17: mod_base = OTHER; note = 2'O-methyl-uridine
  modified_base 18: mod_base = OTHER; note = 2'O-methyl-adenosine
  modified_base 19: mod_base = OTHER; note = 2'O-methyl-cytidine
  modified_base 20: mod_base = OTHER; note = 2'O-methyl-uridine
  modified_base 21: mod_base = OTHER; note = 2'O-methyl-uridine
  modified_base 1..2: mod_base = OTHER; note = phosphorothioate linkage
  modified_base 2..3: mod_base = OTHER; note = phosphorothioate linkage
  modified_base 19..20: mod_base = OTHER; note = phosphorothioate linkage
  modified_base 20..21: mod_base = OTHER; note = phosphorothioate linkage
  source 1..21: mol_type = other RNA
gattctcaactgcatctactt

SEQ ID NO: 635 - RNA, 21 nt, synthetic construct
  misc_feature 1..21: note = siRNA sequence name:ETXS377
  modified_base 1: mod_base = OTHER; note = 2'O-methyl-cytidine
  modified_base 2: mod_base = OTHER; note = 2'O-methyl-adenosine
  modified_base 3: mod_base = OTHER; note = 2'O-methyl-uridine
  modified_base 4: mod_base = OTHER; note = 2'O-methyl-cytidine
  modified_base 5: mod_base = OTHER; note = 2'O-methyl-uridine
  modified_base 6: mod_base = OTHER; note = 2'O-methyl-cytidine
  modified_base 7: mod_base = OTHER; note = 2'Fluoro-adenosine
  modified_base 8: mod_base = OTHER; note = 2'O-methyl-guanosine
  modified_base 9: mod_base = OTHER; note = 2'Fluoro-adenosine
  modified_base 10: mod_base = OTHER; note = 2' Fluoro-cytidine
  modified_base 11: mod_base = OTHER; note = 2' Fluoro-cytidine
  modified_base 12: mod_base = OTHER; note = 2'O-methyl-adenosine
  modified_base 13: mod_base = OTHER; note = 2'O-methyl-adenosine
  modified_base 14: mod_base = OTHER; note = 2'O-methyl-adenosine
  modified_base 15: mod_base = OTHER; note = 2'O-methyl-guanosine
  modified_base 16: mod_base = OTHER; note = 2'O-methyl-guanosine
  modified_base 17: mod_base = OTHER; note = 2'O-methyl-adenosine
  modified_base 18: mod_base = OTHER; note = 2'O-methyl-uridine
  modified_base 19: mod_base = OTHER; note = 2'O-methyl-cytidine
  modified_base 20: mod_base = OTHER; note = 2'O-methyl-guanosine
  modified_base 21: mod_base = OTHER; note = 2'O-methyl-cytidine
  modified_base 1..2: mod_base = OTHER; note = phosphorothioate linkage
  modified_base 2..3: mod_base = OTHER; note = phosphorothioate linkage
  modified_base 19..20: mod_base = OTHER; note = phosphorothioate linkage
  modified_base 20..21: mod_base = OTHER; note = phosphorothioate linkage
  source 1..21: mol_type = other RNA
catctcagaccaaaggatcgc

SEQ ID NO: 636 - RNA, 21 nt, synthetic construct
  misc_feature 1..21: note = siRNA sequence name:ETXS379
  modified_base 1: mod_base = OTHER; note = 2'O-methyl-guanosine
  modified_base 2: mod_base = OTHER; note = 2'O-methyl-guanosine
  modified_base 3: mod_base = OTHER; note = 2'O-methyl-cytidine
  modified_base 4: mod_base = OTHER; note = 2'O-methyl-adenosine
  modified_base 5: mod_base = OTHER; note = 2'O-methyl-uridine
  modified_base 6: mod_base = OTHER; note = 2'O-methyl-cytidine
  modified_base 7: mod_base = OTHER; note = 2' Fluoro-uridine
  modified_base 8: mod_base = OTHER; note = 2'O-methyl-cytidine
  modified_base 9: mod_base = OTHER; note = 2'Fluoro-adenosine
  modified_base 10: mod_base = OTHER; note = 2' Fluoro-guanosine
  modified_base 11: mod_base = OTHER; note = 2'Fluoro-adenosine
  modified_base 12: mod_base = OTHER; note = 2'O-methyl-cytidine
  modified_base 13: mod_base = OTHER; note = 2'O-methyl-cytidine
  modified_base 14: mod_base = OTHER; note = 2'O-methyl-adenosine
  modified_base 15: mod_base = OTHER; note = 2'O-methyl-adenosine
  modified_base 16: mod_base = OTHER; note = 2'O-methyl-adenosine
  modified_base 17: mod_base = OTHER; note = 2'O-methyl-guanosine
  modified_base 18: mod_base = OTHER; note = 2'O-methyl-guanosine
  modified_base 19: mod_base = OTHER; note = 2'O-methyl-adenosine
  modified_base 20: mod_base = OTHER; note = 2'O-methyl-uridine
  modified_base 21: mod_base = OTHER; note = 2'O-methyl-cytidine
  modified_base 1..2: mod_base = OTHER; note = phosphorothioate linkage
  modified_base 2..3: mod_base = OTHER; note = phosphorothioate linkage
  modified_base 19..20: mod_base = OTHER; note = phosphorothioate linkage
  modified_base 20..21: mod_base = OTHER; note = phosphorothioate linkage
  source 1..21: mol_type = other RNA
ggcatctcagaccaaaggatc

SEQ ID NO: 637 - RNA, 21 nt, synthetic construct
  misc_feature 1..21: note = siRNA sequence name:ETXS381
  modified_base 1: mod_base = OTHER; note = 2'O-methyl-uridine
  modified_base 2: mod_base = OTHER; note = 2'O-methyl-cytidine
  modified_base 3: mod_base = OTHER; note = 2'O-methyl-adenosine
  modified_base 4: mod_base = OTHER; note = 2'O-methyl-adenosine
  modified_base 5: mod_base = OTHER; note = 2'O-methyl-cytidine
  modified_base 6: mod_base = OTHER; note = 2'O-methyl-uridine
  modified_base 7: mod_base = OTHER; note = 2' Fluoro-guanosine
  modified_base 8: mod_base = OTHER; note = 2'O-methyl-cytidine
  modified_base 9: mod_base = OTHER; note = 2'Fluoro-adenosine
  modified_base 10: mod_base = OTHER; note = 2' Fluoro-uridine
  modified_base 11: mod_base = OTHER; note = 2' Fluoro-cytidine
  modified_base 12: mod_base = OTHER; note = 2'O-methyl-uridine
  modified_base 13: mod_base = OTHER; note = 2'O-methyl-adenosine
  modified_base 14: mod_base = OTHER; note = 2'O-methyl-cytidine
  modified_base 15: mod_base = OTHER; note = 2'O-methyl-uridine
  modified_base 16: mod_base = OTHER; note = 2'O-methyl-uridine
  modified_base 17: mod_base = OTHER; note = 2'O-methyl-cytidine
  modified_base 18: mod_base = OTHER; note = 2'O-methyl-adenosine
  modified_base 19: mod_base = OTHER; note = 2'O-methyl-adenosine
  modified_base 20: mod_base = OTHER; note = 2'O-methyl-adenosine
  modified_base 21: mod_base = OTHER; note = 2'O-methyl-guanosine
  modified_base 1..2: mod_base = OTHER; note = phosphorothioate linkage
  modified_base 2..3: mod_base = OTHER; note = phosphorothioate linkage
  modified_base 19..20: mod_base = OTHER; note = phosphorothioate linkage
  modified_base 20..21: mod_base = OTHER; note = phosphorothioate linkage
  source 1..21: mol_type = other RNA
tcaactgcatctacttcaaag

SEQ ID NO: 638 - RNA, 21 nt, synthetic construct
  misc_feature 1..21: note = siRNA sequence name:ETXS383
  modified_base 1: mod_base = OTHER; note = 2'O-methyl-cytidine
  modified_base 2: mod_base = OTHER; note = 2'O-methyl-adenosine
  modified_base 3: mod_base = OTHER; note = 2'O-methyl-adenosine
  modified_base 4: mod_base = OTHER; note = 2'O-methyl-guanosine
  modified_base 5: mod_base = OTHER; note = 2'O-methyl-uridine
  modified_base 6: mod_base = OTHER; note = 2'O-methyl-cytidine
  modified_base 7: mod_base = OTHER; note = 2' Fluoro-cytidine
  modified_base 8: mod_base = OTHER; note = 2'O-methyl-guanosine
  modified_base 9: mod_base = OTHER; note = 2' Fluoro-cytidine
  modified_base 10: mod_base = OTHER; note = 2' Fluoro-uridine
  modified_base 11: mod_base = OTHER; note = 2' Fluoro-uridine
  modified_base 12: mod_base = OTHER; note = 2'O-methyl-cytidine
  modified_base 13: mod_base = OTHER; note = 2'O-methyl-adenosine
  modified_base 14: mod_base = OTHER; note = 2'O-methyl-cytidine
  modified_base 15: mod_base = OTHER; note = 2'O-methyl-uridine
  modified_base 16: mod_base = OTHER; note = 2'O-methyl-guanosine
  modified_base 17: mod_base = OTHER; note = 2'O-methyl-uridine
  modified_base 18: mod_base = OTHER; note = 2'O-methyl-cytidine
  modified_base 19: mod_base = OTHER; note = 2'O-methyl-guanosine
  modified_base 20: mod_base = OTHER; note = 2'O-methyl-adenosine
  modified_base 21: mod_base = OTHER; note = 2'O-methyl-cytidine
  modified_base 1..2: mod_base = OTHER; note = phosphorothioate linkage
  modified_base 2..3: mod_base = OTHER; note = phosphorothioate linkage
  modified_base 19..20: mod_base = OTHER; note = phosphorothioate linkage
  modified_base 20..21: mod_base = OTHER; note = phosphorothioate linkage
  source 1..21: mol_type = other RNA
caagtccgcttcactgtcgac

SEQ ID NO: 639 - RNA, 21 nt, synthetic construct
  misc_feature 1..21: note = siRNA sequence name:ETXS385
  modified_base 1: mod_base = OTHER; note = 2'O-methyl-guanosine
  modified_base 2: mod_base = OTHER; note = 2'O-methyl-guanosine
  modified_base 3: mod_base = OTHER; note = 2'O-methyl-guanosine
  modified_base 4: mod_base = OTHER; note = 2'O-methyl-guanosine
  modified_base 5: mod_base = OTHER; note = 2'O-methyl-cytidine
  modified_base 6: mod_base = OTHER; note = 2'O-methyl-adenosine
  modified_base 7: mod_base = OTHER; note = 2' Fluoro-uridine
  modified_base 8: mod_base = OTHER; note = 2'O-methyl-cytidine
  modified_base 9: mod_base = OTHER; note = 2'Fluoro-adenosine
  modified_base 10: mod_base = OTHER; note = 2' Fluoro-guanosine
  modified_base 11: mod_base = OTHER; note = 2' Fluoro-cytidine
  modified_base 12: mod_base = OTHER; note = 2'O-methyl-adenosine
  modified_base 13: mod_base = OTHER; note = 2'O-methyl-uridine
  modified_base 14: mod_base = OTHER; note = 2'O-methyl-guanosine
  modified_base 15: mod_base = OTHER; note = 2'O-methyl-cytidine
  modified_base 16: mod_base = OTHER; note = 2'O-methyl-uridine
  modified_base 17: mod_base = OTHER; note = 2'O-methyl-adenosine
  modified_base 18: mod_base = OTHER; note = 2'O-methyl-adenosine
  modified_base 19: mod_base = OTHER; note = 2'O-methyl-uridine
  modified_base 20: mod_base = OTHER; note = 2'O-methyl-uridine
  modified_base 21: mod_base = OTHER; note = 2'O-methyl-guanosine
  modified_base 1..2: mod_base = OTHER; note = phosphorothioate linkage
  modified_base 2..3: mod_base = OTHER; note = phosphorothioate linkage
  modified_base 19..20: mod_base = OTHER; note = phosphorothioate linkage
  modified_base 20..21: mod_base = OTHER; note = phosphorothioate linkage
  source 1..21: mol_type = other RNA
ggggcatcagcatgctaattg

SEQ ID NO: 640 - RNA, 21 nt, synthetic construct
  misc_feature 1..21: note = siRNA sequence name:ETXS387
  modified_base 1: mod_base = OTHER; note = 2'O-methyl-adenosine
  modified_base 2: mod_base = OTHER; note = 2'O-methyl-guanosine
  modified_base 3: mod_base = OTHER; note = 2'O-methyl-uridine
  modified_base 4: mod_base = OTHER; note = 2'O-methyl-adenosine
  modified_base 5: mod_base = OTHER; note = 2'O-methyl-uridine
  modified_base 6: mod_base = OTHER; note = 2'O-methyl-uridine
  modified_base 7: mod_base = OTHER; note = 2'Fluoro-adenosine
  modified_base 8: mod_base = OTHER; note = 2'O-methyl-cytidine
  modified_base 9: mod_base = OTHER; note = 2' Fluoro-uridine
  modified_base 10: mod_base = OTHER; note = 2' Fluoro-uridine
  modified_base 11: mod_base = OTHER; note = 2' Fluoro-uridine
  modified_base 12: mod_base = OTHER; note = 2'O-methyl-guanosine
  modified_base 13: mod_base = OTHER; note = 2'O-methyl-cytidine
  modified_base 14: mod_base = OTHER; note = 2'O-methyl-uridine
  modified_base 15: mod_base = OTHER; note = 2'O-methyl-guanosine
  modified_base 16: mod_base = OTHER; note = 2'O-methyl-adenosine
  modified_base 17: mod_base = OTHER; note = 2'O-methyl-guanosine
  modified_base 18: mod_base = OTHER; note = 2'O-methyl-guanosine
  modified_base 19: mod_base = OTHER; note = 2'O-methyl-cytidine
  modified_base 20: mod_base = OTHER; note = 2'O-methyl-cytidine
  modified_base 21: mod_base = OTHER; note = 2'O-methyl-cytidine
  modified_base 1..2: mod_base = OTHER; note = phosphorothioate linkage
  modified_base 2..3: mod_base = OTHER; note = phosphorothioate linkage
  modified_base 19..20: mod_base = OTHER; note = phosphorothioate linkage
  modified_base 20..21: mod_base = OTHER; note = phosphorothioate linkage
  source 1..21: mol_type = other RNA
agtattactttgctgaggccc

SEQ ID NO: 641 - RNA, 21 nt, synthetic construct
  misc_feature 1..21: note = siRNA sequence name:ETXS389
  modified_base 1: mod_base = OTHER; note = 2'O-methyl-guanosine
  modified_base 2: mod_base = OTHER; note = 2'O-methyl-guanosine
  modified_base 3: mod_base = OTHER; note = 2'O-methyl-uridine
  modified_base 4: mod_base = OTHER; note = 2'O-methyl-guanosine
  modified_base 5: mod_base = OTHER; note = 2'O-methyl-guanosine
  modified_base 6: mod_base = OTHER; note = 2'O-methyl-guanosine
  modified_base 7: mod_base = OTHER; note = 2' Fluoro-guanosine
  modified_base 8: mod_base = OTHER; note = 2'O-methyl-uridine
  modified_base 9: mod_base = OTHER; note = 2' Fluoro-uridine
  modified_base 10: mod_base = OTHER; note = 2' Fluoro-cytidine
  modified_base 11: mod_base = OTHER; note = 2'Fluoro-adenosine
  modified_base 12: mod_base = OTHER; note = 2'O-methyl-uridine
  modified_base 13: mod_base = OTHER; note = 2'O-methyl-guanosine
  modified_base 14: mod_base = OTHER; note = 2'O-methyl-cytidine
  modified_base 15: mod_base = OTHER; note = 2'O-methyl-cytidine
  modified_base 16: mod_base = OTHER; note = 2'O-methyl-guanosine
  modified_base 17: mod_base = OTHER; note = 2'O-methyl-cytidine
  modified_base 18: mod_base = OTHER; note = 2'O-methyl-uridine
  modified_base 19: mod_base = OTHER; note = 2'O-methyl-guanosine
  modified_base 20: mod_base = OTHER; note = 2'O-methyl-uridine
  modified_base 21: mod_base = OTHER; note = 2'O-methyl-cytidine
  modified_base 1..2: mod_base = OTHER; note = phosphorothioate linkage
  modified_base 2..3: mod_base = OTHER; note = phosphorothioate linkage
  modified_base 19..20: mod_base = OTHER; note = phosphorothioate linkage
  modified_base 20..21: mod_base = OTHER; note = phosphorothioate linkage
  source 1..21: mol_type = other RNA
ggtggggttcatgccgctgtc

SEQ ID NO: 642 - RNA, 21 nt, synthetic construct
  misc_feature 1..21: note = siRNA sequence name:ETXS391
  modified_base 1: mod_base = OTHER; note = 2'O-methyl-adenosine
  modified_base 2: mod_base = OTHER; note = 2'O-methyl-cytidine
  modified_base 3: mod_base = OTHER; note = 2'O-methyl-cytidine
  modified_base 4: mod_base = OTHER; note = 2'O-methyl-adenosine
  modified_base 5: mod_base = OTHER; note = 2'O-methyl-guanosine
  modified_base 6: mod_base = OTHER; note = 2'O-methyl-cytidine
  modified_base 7: mod_base = OTHER; note = 2' Fluoro-uridine
  modified_base 8: mod_base = OTHER; note = 2'O-methyl-guanosine
  modified_base 9: mod_base = OTHER; note = 2' Fluoro-cytidine
  modified_base 10: mod_base = OTHER; note = 2' Fluoro-cytidine
  modified_base 11: mod_base = OTHER; note = 2' Fluoro-uridine
  modified_base 12: mod_base = OTHER; note = 2'O-methyl-guanosine
  modified_base 13: mod_base = OTHER; note = 2'O-methyl-cytidine
  modified_base 14: mod_base = OTHER; note = 2'O-methyl-uridine
  modified_base 15: mod_base = OTHER; note = 2'O-methyl-cytidine
  modified_base 16: mod_base = OTHER; note = 2'O-methyl-uridine
  modified_base 17: mod_base = OTHER; note = 2'O-methyl-uridine
  modified_base 18: mod_base = OTHER; note = 2'O-methyl-cytidine
  modified_base 19: mod_base = OTHER; note = 2'O-methyl-adenosine
  modified_base 20: mod_base = OTHER; note = 2'O-methyl-uridine
  modified_base 21: mod_base = OTHER; note = 2'O-methyl-guanosine
  modified_base 1..2: mod_base = OTHER; note = phosphorothioate linkage
  modified_base 2..3: mod_base = OTHER; note = phosphorothioate linkage
  modified_base 19..20: mod_base = OTHER; note = phosphorothioate linkage
  modified_base 20..21: mod_base = OTHER; note = phosphorothioate linkage
  source 1..21: mol_type = other RNA
accagctgcctgctcttcatg

SEQ ID NO: 643 - RNA, 21 nt, synthetic construct
  misc_feature 1..21: note = siRNA sequence name:ETXS393
  modified_base 1: mod_base = OTHER; note = 2'O-methyl-uridine
  modified_base 2: mod_base = OTHER; note = 2'O-methyl-guanosine
  modified_base 3: mod_base = OTHER; note = 2'O-methyl-guanosine
  modified_base 4: mod_base = OTHER; note = 2'O-methyl-guanosine
  modified_base 5: mod_base = OTHER; note = 2'O-methyl-uridine
  modified_base 6: mod_base = OTHER; note = 2'O-methyl-guanosine
  modified_base 7: mod_base = OTHER; note = 2'Fluoro-adenosine
  modified_base 8: mod_base = OTHER; note = 2'O-methyl-adenosine
  modified_base 9: mod_base = OTHER; note = 2' Fluoro-uridine
  modified_base 10: mod_base = OTHER; note = 2'Fluoro-adenosine
  modified_base 11: mod_base = OTHER; note = 2'Fluoro-adenosine
  modified_base 12: mod_base = OTHER; note = 2'O-methyl-adenosine
  modified_base 13: mod_base = OTHER; note = 2'O-methyl-uridine
  modified_base 14: mod_base = OTHER; note = 2'O-methyl-uridine
  modified_base 15: mod_base = OTHER; note = 2'O-methyl-cytidine
  modified_base 16: mod_base = OTHER; note = 2'O-methyl-cytidine
  modified_base 17: mod_base = OTHER; note = 2'O-methyl-cytidine
  modified_base 18: mod_base = OTHER; note = 2'O-methyl-adenosine
  modified_base 19: mod_base = OTHER; note = 2'O-methyl-guanosine
  modified_base 20: mod_base = OTHER; note = 2'O-methyl-uridine
  modified_base 21: mod_base = OTHER; note = 2'O-methyl-guanosine
  modified_base 1..2: mod_base = OTHER; note = phosphorothioate linkage
  modified_base 2..3: mod_base = OTHER; note = phosphorothioate linkage
  modified_base 19..20: mod_base = OTHER; note = phosphorothioate linkage
  modified_base 20..21: mod_base = OTHER; note = phosphorothioate linkage
  source 1..21: mol_type = other RNA
tgggtgaataaattcccagtg

SEQ ID NO: 644 - RNA, 21 nt, synthetic construct
  misc_feature 1..21: note = siRNA sequence name:ETXS395
  modified_base 1: mod_base = OTHER; note = 2'O-methyl-adenosine
  modified_base 2: mod_base = OTHER; note = 2'O-methyl-adenosine
  modified_base 3: mod_base = OTHER; note = 2'O-methyl-adenosine
  modified_base 4: mod_base = OTHER; note = 2'O-methyl-adenosine
  modified_base 5: mod_base = OTHER; note = 2'O-methyl-adenosine
  modified_base 6: mod_base = OTHER; note = 2'O-methyl-adenosine
  modified_base 7: mod_base = OTHER; note = 2' Fluoro-guanosine
  modified_base 8: mod_base = OTHER; note = 2'O-methyl-cytidine
  modified_base 9: mod_base = OTHER; note = 2'Fluoro-adenosine
  modified_base 10: mod_base = OTHER; note = 2' Fluoro-uridine
  modified_base 11: mod_base = OTHER; note = 2' Fluoro-guanosine
  modified_base 12: mod_base = OTHER; note = 2'O-methyl-adenosine
  modified_base 13: mod_base = OTHER; note = 2'O-methyl-cytidine
  modified_base 14: mod_base = OTHER; note = 2'O-methyl-adenosine
  modified_base 15: mod_base = OTHER; note = 2'O-methyl-adenosine
  modified_base 16: mod_base = OTHER; note = 2'O-methyl-adenosine
  modified_base 17: mod_base = OTHER; note = 2'O-methyl-cytidine
  modified_base 18: mod_base = OTHER; note = 2'O-methyl-adenosine
  modified_base 19: mod_base = OTHER; note = 2'O-methyl-guanosine
  modified_base 20: mod_base = OTHER; note = 2'O-methyl-adenosine
  modified_base 21: mod_base = OTHER; note = 2'O-methyl-adenosine
  modified_base 1..2: mod_base = OTHER; note = phosphorothioate linkage
  modified_base 2..3: mod_base = OTHER; note = phosphorothioate linkage
  modified_base 19..20: mod_base = OTHER; note = phosphorothioate linkage
  modified_base 20..21: mod_base = OTHER; note = phosphorothioate linkage
  source 1..21: mol_type = other RNA
aaaaaagcatgacaaacagaa

SEQ ID NO: 645 - RNA, 21 nt, synthetic construct
  misc_feature 1..21: note = siRNA sequence name:ETXS397
  modified_base 1: mod_base = OTHER; note = 2'O-methyl-cytidine
  modified_base 2: mod_base = OTHER; note = 2'O-methyl-cytidine
  modified_base 3: mod_base = OTHER; note = 2'O-methyl-adenosine
  modified_base 4: mod_base = OTHER; note = 2'O-methyl-adenosine
  modified_base 5: mod_base = OTHER; note = 2'O-methyl-guanosine
  modified_base 6: mod_base = OTHER; note = 2'O-methyl-uridine
  modified_base 7: mod_base = OTHER; note = 2' Fluoro-cytidine
  modified_base 8: mod_base = OTHER; note = 2'O-methyl-cytidine
  modified_base 9: mod_base = OTHER; note = 2' Fluoro-guanosine
  modified_base 10: mod_base = OTHER; note = 2' Fluoro-cytidine
  modified_base 11: mod_base = OTHER; note = 2' Fluoro-uridine
  modified_base 12: mod_base = OTHER; note = 2'O-methyl-uridine
  modified_base 13: mod_base = OTHER; note = 2'O-methyl-cytidine
  modified_base 14: mod_base = OTHER; note = 2'O-methyl-adenosine
  modified_base 15: mod_base = OTHER; note = 2'O-methyl-cytidine
  modified_base 16: mod_base = OTHER; note = 2'O-methyl-uridine
  modified_base 17: mod_base = OTHER; note = 2'O-methyl-guanosine
  modified_base 18: mod_base = OTHER; note = 2'O-methyl-uridine
  modified_base 19: mod_base = OTHER; note = 2'O-methyl-cytidine
  modified_base 20: mod_base = OTHER; note = 2'O-methyl-guanosine
  modified_base 21: mod_base = OTHER; note = 2'O-methyl-adenosine
  modified_base 1..2: mod_base = OTHER; note = phosphorothioate linkage
  modified_base 2..3: mod_base = OTHER; note = phosphorothioate linkage
  modified_base 19..20: mod_base = OTHER; note = phosphorothioate linkage
  modified_base 20..21: mod_base = OTHER; note = phosphorothioate linkage
  source 1..21: mol_type = other RNA
ccaagtccgcttcactgtcga

SEQ ID NO: 646 - RNA, 21 nt, synthetic construct
  misc_feature 1..21: note = siRNA sequence name:ETXS399
  modified_base 1: mod_base = OTHER; note = 2'O-methyl-adenosine
  modified_base 2: mod_base = OTHER; note = 2'O-methyl-adenosine
  modified_base 3: mod_base = OTHER; note = 2'O-methyl-guanosine
  modified_base 4: mod_base = OTHER; note = 2'O-methyl-adenosine
  modified_base 5: mod_base = OTHER; note = 2'O-methyl-guanosine
  modified_base 6: mod_base = OTHER; note = 2'O-methyl-cytidine
  modified_base 7: mod_base = OTHER; note = 2' Fluoro-cytidine
  modified_base 8: mod_base = OTHER; note = 2'O-methyl-guanosine
  modified_base 9: mod_base = OTHER; note = 2' Fluoro-guanosine
  modified_base 10: mod_base = OTHER; note = 2'Fluoro-adenosine
  modified_base 11: mod_base = OTHER; note = 2' Fluoro-uridine
  modified_base 12: mod_base = OTHER; note = 2'O-methyl-cytidine
  modified_base 13: mod_base = OTHER; note = 2'O-methyl-cytidine
  modified_base 14: mod_base = OTHER; note = 2'O-methyl-adenosine
  modified_base 15: mod_base = OTHER; note = 2'O-methyl-guanosine
  modified_base 16: mod_base = OTHER; note = 2'O-methyl-cytidine
  modified_base 17: mod_base = OTHER; note = 2'O-methyl-guanosine
  modified_base 18: mod_base = OTHER; note = 2'O-methyl-uridine
  modified_base 19: mod_base = OTHER; note = 2'O-methyl-cytidine
  modified_base 20: mod_base = OTHER; note = 2'O-methyl-uridine
  modified_base 21: mod_base = OTHER; note = 2'O-methyl-uridine
  modified_base 1..2: mod_base = OTHER; note = phosphorothioate linkage
  modified_base 2..3: mod_base = OTHER; note = phosphorothioate linkage
  modified_base 19..20: mod_base = OTHER; note = phosphorothioate linkage
  modified_base 20..21: mod_base = OTHER; note = phosphorothioate linkage
  source 1..21: mol_type = other RNA
aagagccggatccagcgtctt

SEQ ID NO: 647 - RNA, 21 nt, synthetic construct
  misc_feature 1..21: note = siRNA sequence name:ETXS401
  modified_base 1: mod_base = OTHER; note = 2'O-methyl-adenosine
  modified_base 2: mod_base = OTHER; note = 2'O-methyl-adenosine
  modified_base 3: mod_base = OTHER; note = 2'O-methyl-adenosine
  modified_base 4: mod_base = OTHER; note = 2'O-methyl-adenosine
  modified_base 5: mod_base = OTHER; note = 2'O-methyl-guanosine
  modified_base 6: mod_base = OTHER; note = 2'O-methyl-cytidine
  modified_base 7: mod_base = OTHER; note = 2'Fluoro-adenosine
  modified_base 8: mod_base = OTHER; note = 2'O-methyl-uridine
  modified_base 9: mod_base = OTHER; note = 2' Fluoro-guanosine
  modified_base 10: mod_base = OTHER; note = 2'Fluoro-adenosine
  modified_base 11: mod_base = OTHER; note = 2' Fluoro-cytidine
  modified_base 12: mod_base = OTHER; note = 2'O-methyl-adenosine
  modified_base 13: mod_base = OTHER; note = 2'O-methyl-adenosine
  modified_base 14: mod_base = OTHER; note = 2'O-methyl-adenosine
  modified_base 15: mod_base = OTHER; note = 2'O-methyl-cytidine
  modified_base 16: mod_base = OTHER; note = 2'O-methyl-adenosine
  modified_base 17: mod_base = OTHER; note = 2'O-methyl-guanosine
  modified_base 18: mod_base = OTHER; note = 2'O-methyl-adenosine
  modified_base 19: mod_base = OTHER; note = 2'O-methyl-adenosine
  modified_base 20: mod_base = OTHER; note = 2'O-methyl-cytidine
  modified_base 21: mod_base = OTHER; note = 2'O-methyl-uridine
  modified_base 1..2: mod_base = OTHER; note = phosphorothioate linkage
  modified_base 2..3: mod_base = OTHER; note = phosphorothioate linkage
  modified_base 19..20: mod_base = OTHER; note = phosphorothioate linkage
  modified_base 20..21: mod_base = OTHER; note = phosphorothioate linkage
  source 1..21: mol_type = other RNA
aaaagcatgacaaacagaact

SEQ ID NO: 648 - RNA, 21 nt, synthetic construct
  misc_feature 1..21: note = siRNA sequence name:ETXS403
  modified_base 1: mod_base = OTHER; note = 2'O-methyl-uridine
  modified_base 2: mod_base = OTHER; note = 2'O-methyl-cytidine
  modified_base 3: mod_base = OTHER; note = 2'O-methyl-adenosine
  modified_base 4: mod_base = OTHER; note = 2'O-methyl-uridine
  modified_base 5: mod_base = OTHER; note = 2'O-methyl-guanosine
  modified_base 6: mod_base = OTHER; note = 2'O-methyl-cytidine
  modified_base 7: mod_base = OTHER; note = 2' Fluoro-cytidine
  modified_base 8: mod_base = OTHER; note = 2'O-methyl-guanosine
  modified_base 9: mod_base = OTHER; note = 2' Fluoro-cytidine
  modified_base 10: mod_base = OTHER; note = 2' Fluoro-uridine
  modified_base 11: mod_base = OTHER; note = 2' Fluoro-guanosine
  modified_base 12: mod_base = OTHER; note = 2'O-methyl-uridine
  modified_base 13: mod_base = OTHER; note = 2'O-methyl-cytidine
  modified_base 14: mod_base = OTHER; note = 2'O-methyl-cytidine
  modified_base 15: mod_base = OTHER; note = 2'O-methyl-adenosine
  modified_base 16: mod_base = OTHER; note = 2'O-methyl-cytidine
  modified_base 17: mod_base = OTHER; note = 2'O-methyl-cytidine
  modified_base 18: mod_base = OTHER; note = 2'O-methyl-cytidine
  modified_base 19: mod_base = OTHER; note = 2'O-methyl-adenosine
  modified_base 20: mod_base = OTHER; note = 2'O-methyl-adenosine
  modified_base 21: mod_base = OTHER; note = 2'O-methyl-guanosine
  modified_base 1..2: mod_base = OTHER; note = phosphorothioate linkage
  modified_base 2..3: mod_base = OTHER; note = phosphorothioate linkage
  modified_base 19..20: mod_base = OTHER; note = phosphorothioate linkage
  modified_base 20..21: mod_base = OTHER; note = phosphorothioate linkage
  source 1..21: mol_type = other RNA
tcatgccgctgtccacccaag

SEQ ID NO: 649 - RNA, 21 nt, synthetic construct
  misc_feature 1..21: note = siRNA sequence name:ETXS405
  modified_base 1: mod_base = OTHER; note = 2'O-methyl-adenosine
  modified_base 2: mod_base = OTHER; note = 2'O-methyl-guanosine
  modified_base 3: mod_base = OTHER; note = 2'O-methyl-cytidine
  modified_base 4: mod_base = OTHER; note = 2'O-methyl-adenosine
  modified_base 5: mod_base = OTHER; note = 2'O-methyl-uridine
  modified_base 6: mod_base = OTHER; note = 2'O-methyl-guanosine
  modified_base 7: mod_base = OTHER; note = 2'Fluoro-adenosine
  modified_base 8: mod_base = OTHER; note = 2'O-methyl-cytidine
  modified_base 9: mod_base = OTHER; note = 2'Fluoro-adenosine
  modified_base 10: mod_base = OTHER; note = 2'Fluoro-adenosine
  modified_base 11: mod_base = OTHER; note = 2'Fluoro-adenosine
  modified_base 12: mod_base = OTHER; note = 2'O-methyl-cytidine
  modified_base 13: mod_base = OTHER; note = 2'O-methyl-adenosine
  modified_base 14: mod_base = OTHER; note = 2'O-methyl-guanosine
  modified_base 15: mod_base = OTHER; note = 2'O-methyl-adenosine
  modified_base 16: mod_base = OTHER; note = 2'O-methyl-adenosine
  modified_base 17: mod_base = OTHER; note = 2'O-methyl-cytidine
  modified_base 18: mod_base = OTHER; note = 2'O-methyl-uridine
  modified_base 19: mod_base = OTHER; note = 2'O-methyl-cytidine
  modified_base 20: mod_base = OTHER; note = 2'O-methyl-guanosine
  modified_base 21: mod_base = OTHER; note = 2'O-methyl-adenosine
  modified_base 1..2: mod_base = OTHER; note = phosphorothioate linkage
  modified_base 2..3: mod_base = OTHER; note = phosphorothioate linkage
  modified_base 19..20: mod_base = OTHER; note = phosphorothioate linkage
  modified_base 20..21: mod_base = OTHER; note = phosphorothioate linkage
  source 1..21: mol_type = other RNA
agcatgacaaacagaactcga

SEQ ID NO: 650 - RNA, 21 nt, synthetic construct
  misc_feature 1..21: note = siRNA sequence name:ETXS407
  modified_base 1: mod_base = OTHER; note = 2'O-methyl-cytidine
  modified_base 2: mod_base = OTHER; note = 2'O-methyl-adenosine
  modified_base 3: mod_base = OTHER; note = 2'O-methyl-cytidine
  modified_base 4: mod_base = OTHER; note = 2'O-methyl-adenosine
  modified_base 5: mod_base = OTHER; note = 2'O-methyl-cytidine
  modified_base 6: mod_base = OTHER; note = 2'O-methyl-adenosine
  modified_base 7: mod_base = OTHER; note = 2'Fluoro-adenosine
  modified_base 8: mod_base = OTHER; note = 2'O-methyl-cytidine
  modified_base 9: mod_base = OTHER; note = 2' Fluoro-cytidine
  modified_base 10: mod_base = OTHER; note = 2'Fluoro-adenosine
  modified_base 11: mod_base = OTHER; note = 2' Fluoro-cytidine
  modified_base 12: mod_base = OTHER; note = 2'O-methyl-adenosine
  modified_base 13: mod_base = OTHER; note = 2'O-methyl-adenosine
  modified_base 14: mod_base = OTHER; note = 2'O-methyl-cytidine
  modified_base 15: mod_base = OTHER; note = 2'O-methyl-uridine
  modified_base 16: mod_base = OTHER; note = 2'O-methyl-uridine
  modified_base 17: mod_base = OTHER; note = 2'O-methyl-cytidine
  modified_base 18: mod_base = OTHER; note = 2'O-methyl-cytidine
  modified_base 19: mod_base = OTHER; note = 2'O-methyl-guanosine
  modified_base 20: mod_base = OTHER; note = 2'O-methyl-guanosine
  modified_base 21: mod_base = OTHER; note = 2'O-methyl-cytidine
  modified_base 1..2: mod_base = OTHER; note = phosphorothioate linkage
  modified_base 2..3: mod_base = OTHER; note = phosphorothioate linkage
  modified_base 19..20: mod_base = OTHER; note = phosphorothioate linkage
  modified_base 20..21: mod_base = OTHER; note = phosphorothioate linkage
  source 1..21: mol_type = other RNA
cacacaaccacaacttccggc

SEQ ID NO: 651 - RNA, 21 nt, synthetic construct
  misc_feature 1..21: note = siRNA sequence name:ETXS409
  modified_base 1: mod_base = OTHER; note = 2'O-methyl-cytidine
  modified_base 2: mod_base = OTHER; note = 2'O-methyl-adenosine
  modified_base 3: mod_base = OTHER; note = 2'O-methyl-cytidine
  modified_base 4: mod_base = OTHER; note = 2'O-methyl-adenosine
  modified_base 5: mod_base = OTHER; note = 2'O-methyl-adenosine
  modified_base 6: mod_base = OTHER; note = 2'O-methyl-cytidine
  modified_base 7: mod_base = OTHER; note = 2' Fluoro-cytidine
  modified_base 8: mod_base = OTHER; note = 2'O-methyl-adenosine
  modified_base 9: mod_base = OTHER; note = 2' Fluoro-cytidine
  modified_base 10: mod_base = OTHER; note = 2'Fluoro-adenosine
  modified_base 11: mod_base = OTHER; note = 2'Fluoro-adenosine
  modified_base 12: mod_base = OTHER; note = 2'O-methyl-cytidine
  modified_base 13: mod_base = OTHER; note = 2'O-methyl-uridine
  modified_base 14: mod_base = OTHER; note = 2'O-methyl-uridine
  modified_base 15: mod_base = OTHER; note = 2'O-methyl-cytidine
  modified_base 16: mod_base = OTHER; note = 2'O-methyl-cytidine
  modified_base 17: mod_base = OTHER; note = 2'O-methyl-guanosine
  modified_base 18: mod_base = OTHER; note = 2'O-methyl-guanosine
  modified_base 19: mod_base = OTHER; note = 2'O-methyl-cytidine
  modified_base 20: mod_base = OTHER; note = 2'O-methyl-uridine
  modified_base 21: mod_base = OTHER; note = 2'O-methyl-guanosine
  modified_base 1..2: mod_base = OTHER; note = phosphorothioate linkage
  modified_base 2..3: mod_base = OTHER; note = phosphorothioate linkage
  modified_base 19..20: mod_base = OTHER; note = phosphorothioate linkage
  modified_base 20..21: mod_base = OTHER; note = phosphorothioate linkage
  source 1..21: mol_type = other RNA
cacaaccacaacttccggctg

SEQ ID NO: 652 - RNA, 21 nt, synthetic construct
  misc_feature 1..21: note = siRNA sequence name:ETXS411
  modified_base 1: mod_base = OTHER; note = 2'O-methyl-adenosine
  modified_base 2: mod_base = OTHER; note = 2'O-methyl-guanosine
  modified_base 3: mod_base = OTHER; note = 2'O-methyl-adenosine
  modified_base 4: mod_base = OTHER; note = 2'O-methyl-guanosine
  modified_base 5: mod_base = OTHER; note = 2'O-methyl-cytidine
  modified_base 6: mod_base = OTHER; note = 2'O-methyl-cytidine
  modified_base 7: mod_base = OTHER; note = 2' Fluoro-guanosine
  modified_base 8: mod_base = OTHER; note = 2'O-methyl-guanosine
  modified_base 9: mod_base = OTHER; note = 2'Fluoro-adenosine
  modified_base 10: mod_base = OTHER; note = 2' Fluoro-uridine
  modified_base 11: mod_base = OTHER; note = 2' Fluoro-cytidine
  modified_base 12: mod_base = OTHER; note = 2'O-methyl-cytidine
  modified_base 13: mod_base = OTHER; note = 2'O-methyl-adenosine
  modified_base 14: mod_base = OTHER; note = 2'O-methyl-guanosine
  modified_base 15: mod_base = OTHER; note = 2'O-methyl-cytidine
  modified_base 16: mod_base = OTHER; note = 2'O-methyl-guanosine
  modified_base 17: mod_base = OTHER; note = 2'O-methyl-uridine
  modified_base 18: mod_base = OTHER; note = 2'O-methyl-cytidine
  modified_base 19: mod_base = OTHER; note = 2'O-methyl-uridine
  modified_base 20: mod_base = OTHER; note = 2'O-methyl-uridine
  modified_base 21: mod_base = OTHER; note = 2'O-methyl-adenosine
  modified_base 1..2: mod_base = OTHER; note = phosphorothioate linkage
  modified_base 2..3: mod_base = OTHER; note = phosphorothioate linkage
  modified_base 19..20: mod_base = OTHER; note = phosphorothioate linkage
  modified_base 20..21: mod_base = OTHER; note = phosphorothioate linkage
  source 1..21: mol_type = other RNA
agagccggatccagcgtctta

SEQ ID NO: 653 - RNA, 21 nt, synthetic construct
  misc_feature 1..21: note = siRNA sequence name:ETXS413
  modified_base 1: mod_base = OTHER; note = 2'O-methyl-adenosine
  modified_base 2: mod_base = OTHER; note = 2'O-methyl-cytidine
  modified_base 3: mod_base = OTHER; note = 2'O-methyl-adenosine
  modified_base 4: mod_base = OTHER; note = 2'O-methyl-adenosine
  modified_base 5: mod_base = OTHER; note = 2'O-methyl-cytidine
  modified_base 6: mod_base = OTHER; note = 2'O-methyl-cytidine
  modified_base 7: mod_base = OTHER; note = 2'Fluoro-adenosine
  modified_base 8: mod_base = OTHER; note = 2'O-methyl-cytidine
  modified_base 9: mod_base = OTHER; note = 2'Fluoro-adenosine
  modified_base 10: mod_base = OTHER; note = 2'Fluoro-adenosine
  modified_base 11: mod_base = OTHER; note = 2' Fluoro-cytidine
  modified_base 12: mod_base = OTHER; note = 2'O-methyl-uridine
  modified_base 13: mod_base = OTHER; note = 2'O-methyl-uridine
  modified_base 14: mod_base = OTHER; note = 2'O-methyl-cytidine
  modified_base 15: mod_base = OTHER; note = 2'O-methyl-cytidine
  modified_base 16: mod_base = OTHER; note = 2'O-methyl-guanosine
  modified_base 17: mod_base = OTHER; note = 2'O-methyl-guanosine
  modified_base 18: mod_base = OTHER; note = 2'O-methyl-cytidine
  modified_base 19: mod_base = OTHER; note = 2'O-methyl-uridine
  modified_base 20: mod_base = OTHER; note = 2'O-methyl-guanosine
  modified_base 21: mod_base = OTHER; note = 2'O-methyl-adenosine
  modified_base 1..2: mod_base = OTHER; note = phosphorothioate linkage
  modified_base 2..3: mod_base = OTHER; note = phosphorothioate linkage
  modified_base 19..20: mod_base = OTHER; note = phosphorothioate linkage
  modified_base 20..21: mod_base = OTHER; note = phosphorothioate linkage
  source 1..21: mol_type = other RNA
acaaccacaacttccggctga

SEQ ID NO: 654 - RNA, 21 nt, synthetic construct
  misc_feature 1..21: note = siRNA sequence name:ETXS415
  modified_base 1: mod_base = OTHER; note = 2'O-methyl-adenosine
  modified_base 2: mod_base = OTHER; note = 2'O-methyl-uridine
  modified_base 3: mod_base = OTHER; note = 2'O-methyl-cytidine
  modified_base 4: mod_base = OTHER; note = 2'O-methyl-guanosine
  modified_base 5: mod_base = OTHER; note = 2'O-methyl-adenosine
  modified_base 6: mod_base = OTHER; note = 2'O-methyl-cytidine
  modified_base 7: mod_base = OTHER; note = 2' Fluoro-cytidine
  modified_base 8: mod_base = OTHER; note = 2'O-methyl-uridine
  modified_base 9: mod_base = OTHER; note = 2' Fluoro-guanosine
  modified_base 10: mod_base = OTHER; note = 2' Fluoro-uridine
  modified_base 11: mod_base = OTHER; note = 2' Fluoro-uridine
  modified_base 12: mod_base = OTHER; note = 2'O-methyl-cytidine
  modified_base 13: mod_base = OTHER; note = 2'O-methyl-adenosine
  modified_base 14: mod_base = OTHER; note = 2'O-methyl-adenosine
  modified_base 15: mod_base = OTHER; note = 2'O-methyl-guanosine
  modified_base 16: mod_base = OTHER; note = 2'O-methyl-cytidine
  modified_base 17: mod_base = OTHER; note = 2'O-methyl-adenosine
  modified_base 18: mod_base = OTHER; note = 2'O-methyl-cytidine
  modified_base 19: mod_base = OTHER; note = 2'O-methyl-cytidine
  modified_base 20: mod_base = OTHER; note = 2'O-methyl-adenosine
  modified_base 21: mod_base = OTHER; note = 2'O-methyl-adenosine
  modified_base 1..2: mod_base = OTHER; note = phosphorothioate linkage
  modified_base 2..3: mod_base = OTHER; note = phosphorothioate linkage
  modified_base 19..20: mod_base = OTHER; note = phosphorothioate linkage
  modified_base 20..21: mod_base = OTHER; note = phosphorothioate linkage
  source 1..21: mol_type = other RNA
atcgacctgttcaagcaccaa

SEQ ID NO: 655 - RNA, 21 nt, synthetic construct
  misc_feature 1..21: note = siRNA sequence name:ETXS417
  modified_base 1: mod_base = OTHER; note = 2'O-methyl-guanosine
  modified_base 2: mod_base = OTHER; note = 2'O-methyl-guanosine
  modified_base 3: mod_base = OTHER; note = 2'O-methyl-uridine
  modified_base 4: mod_base = OTHER; note = 2'O-methyl-guanosine
  modified_base 5: mod_base = OTHER; note = 2'O-methyl-guanosine
  modified_base 6: mod_base = OTHER; note = 2'O-methyl-uridine
  modified_base 7: mod_base = OTHER; note = 2' Fluoro-guanosine
  modified_base 8: mod_base = OTHER; note = 2'O-methyl-guanosine
  modified_base 9: mod_base = OTHER; note = 2'Fluoro-adenosine
  modified_base 10: mod_base = OTHER; note = 2' Fluoro-guanosine
  modified_base 11: mod_base = OTHER; note = 2'Fluoro-adenosine
  modified_base 12: mod_base = OTHER; note = 2'O-methyl-guanosine
  modified_base 13: mod_base = OTHER; note = 2'O-methyl-adenosine
  modified_base 14: mod_base = OTHER; note = 2'O-methyl-uridine
  modified_base 15: mod_base = OTHER; note = 2'O-methyl-guanosine
  modified_base 16: mod_base = OTHER; note = 2'O-methyl-guanosine
  modified_base 17: mod_base = OTHER; note = 2'O-methyl-cytidine
  modified_base 18: mod_base = OTHER; note = 2'O-methyl-adenosine
  modified_base 19: mod_base = OTHER; note = 2'O-methyl-adenosine
  modified_base 20: mod_base = OTHER; note = 2'O-methyl-adenosine
  modified_base 21: mod_base = OTHER; note = 2'O-methyl-adenosine
  modified_base 1..2: mod_base = OTHER; note = phosphorothioate linkage
  modified_base 2..3: mod_base = OTHER; note = phosphorothioate linkage
  modified_base 19..20: mod_base = OTHER; note = phosphorothioate linkage
  modified_base 20..21: mod_base = OTHER; note = phosphorothioate linkage
  source 1..21: mol_type = other RNA
ggtggtggagagatggcaaaa

SEQ ID NO: 656 - RNA, 21 nt, synthetic construct
  misc_feature 1..21: note = siRNA sequence name:ETXS419
  modified_base 1: mod_base = OTHER; note = 2'O-methyl-adenosine
  modified_base 2: mod_base = OTHER; note = 2'O-methyl-cytidine
  modified_base 3: mod_base = OTHER; note = 2'O-methyl-cytidine
  modified_base 4: mod_base = OTHER; note = 2'O-methyl-cytidine
  modified_base 5: mod_base = OTHER; note = 2'O-methyl-adenosine
  modified_base 6: mod_base = OTHER; note = 2'O-methyl-adenosine
  modified_base 7: mod_base = OTHER; note = 2' Fluoro-guanosine
  modified_base 8: mod_base = OTHER; note = 2'O-methyl-uridine
  modified_base 9: mod_base = OTHER; note = 2' Fluoro-cytidine
  modified_base 10: mod_base = OTHER; note = 2' Fluoro-cytidine
  modified_base 11: mod_base = OTHER; note = 2' Fluoro-guanosine
  modified_base 12: mod_base = OTHER; note = 2'O-methyl-cytidine
  modified_base 13: mod_base = OTHER; note = 2'O-methyl-uridine
  modified_base 14: mod_base = OTHER; note = 2'O-methyl-uridine
  modified_base 15: mod_base = OTHER; note = 2'O-methyl-cytidine
  modified_base 16: mod_base = OTHER; note = 2'O-methyl-adenosine
  modified_base 17: mod_base = OTHER; note = 2'O-methyl-cytidine
  modified_base 18: mod_base = OTHER; note = 2'O-methyl-uridine
  modified_base 19: mod_base = OTHER; note = 2'O-methyl-guanosine
  modified_base 20: mod_base = OTHER; note = 2'O-methyl-uridine
  modified_base 21: mod_base = OTHER; note = 2'O-methyl-cytidine
  modified_base 1..2: mod_base = OTHER; note = phosphorothioate linkage
  modified_base 2..3: mod_base = OTHER; note = phosphorothioate linkage
  modified_base 19..20: mod_base = OTHER; note = phosphorothioate linkage
  modified_base 20..21: mod_base = OTHER; note = phosphorothioate linkage
  source 1..21: mol_type = other RNA
acccaagtccgcttcactgtc

SEQ ID NO: 657 - RNA, 21 nt, synthetic construct
  misc_feature 1..21: note = siRNA sequence name:ETXS421
  modified_base 1: mod_base = OTHER; note = 2'O-methyl-cytidine
  modified_base 2: mod_base = OTHER; note = 2'O-methyl-adenosine
  modified_base 3: mod_base = OTHER; note = 2'O-methyl-uridine
  modified_base 4: mod_base = OTHER; note = 2'O-methyl-guanosine
  modified_base 5: mod_base = OTHER; note = 2'O-methyl-adenosine
  modified_base 6: mod_base = OTHER; note = 2'O-methyl-cytidine
  modified_base 7: mod_base = OTHER; note = 2'Fluoro-adenosine
  modified_base 8: mod_base = OTHER; note = 2'O-methyl-adenosine
  modified_base 9: mod_base = OTHER; note = 2'Fluoro-adenosine
  modified_base 10: mod_base = OTHER; note = 2' Fluoro-cytidine
  modified_base 11: mod_base = OTHER; note = 2'Fluoro-adenosine
  modified_base 12: mod_base = OTHER; note = 2'O-methyl-guanosine
  modified_base 13: mod_base = OTHER; note = 2'O-methyl-adenosine
  modified_base 14: mod_base = OTHER; note = 2'O-methyl-adenosine
  modified_base 15: mod_base = OTHER; note = 2'O-methyl-cytidine
  modified_base 16: mod_base = OTHER; note = 2'O-methyl-uridine
  modified_base 17: mod_base = OTHER; note = 2'O-methyl-cytidine
  modified_base 18: mod_base = OTHER; note = 2'O-methyl-guanosine
  modified_base 19: mod_base = OTHER; note = 2'O-methyl-adenosine
  modified_base 20: mod_base = OTHER; note = 2'O-methyl-guanosine
  modified_base 21: mod_base = OTHER; note = 2'O-methyl-adenosine
  modified_base 1..2: mod_base = OTHER; note = phosphorothioate linkage
  modified_base 2..3: mod_base = OTHER; note = phosphorothioate linkage
  modified_base 19..20: mod_base = OTHER; note = phosphorothioate linkage
  modified_base 20..21: mod_base = OTHER; note = phosphorothioate linkage
  source 1..21: mol_type = other RNA
catgacaaacagaactcgaga

SEQ ID NO: 658 - RNA, 21 nt, synthetic construct
  misc_feature 1..21: note = siRNA sequence name:ETXS423
  modified_base 1: mod_base = OTHER; note = 2'O-methyl-guanosine
  modified_base 2: mod_base = OTHER; note = 2'O-methyl-cytidine
  modified_base 3: mod_base = OTHER; note = 2'O-methyl-cytidine
  modified_base 4: mod_base = OTHER; note = 2'O-methyl-guanosine
  modified_base 5: mod_base = OTHER; note = 2'O-methyl-guanosine
  modified_base 6: mod_base = OTHER; note = 2'O-methyl-adenosine
  modified_base 7: mod_base = OTHER; note = 2' Fluoro-uridine
  modified_base 8: mod_base = OTHER; note = 2'O-methyl-cytidine
  modified_base 9: mod_base = OTHER; note = 2' Fluoro-cytidine
  modified_base 10: mod_base = OTHER; note = 2'Fluoro-adenosine
  modified_base 11: mod_base = OTHER; note = 2' Fluoro-guanosine
  modified_base 12: mod_base = OTHER; note = 2'O-methyl-cytidine
  modified_base 13: mod_base = OTHER; note = 2'O-methyl-guanosine
  modified_base 14: mod_base = OTHER; note = 2'O-methyl-uridine
  modified_base 15: mod_base = OTHER; note = 2'O-methyl-cytidine
  modified_base 16: mod_base = OTHER; note = 2'O-methyl-uridine
  modified_base 17: mod_base = OTHER; note = 2'O-methyl-uridine
  modified_base 18: mod_base = OTHER; note = 2'O-methyl-adenosine
  modified_base 19: mod_base = OTHER; note = 2'O-methyl-adenosine
  modified_base 20: mod_base = OTHER; note = 2'O-methyl-cytidine
  modified_base 21: mod_base = OTHER; note = 2'O-methyl-adenosine
  modified_base 1..2: mod_base = OTHER; note = phosphorothioate linkage
  modified_base 2..3: mod_base = OTHER; note = phosphorothioate linkage
  modified_base 19..20: mod_base = OTHER; note = phosphorothioate linkage
  modified_base 20..21: mod_base = OTHER; note = phosphorothioate linkage
  source 1..21: mol_type = other RNA
gccggatccagcgtcttaaca

SEQ ID NO: 659 - RNA, 21 nt, synthetic construct
  misc_feature 1..21: note = siRNA sequence name:ETXS425
  modified_base 1: mod_base = OTHER; note = 2'O-methyl-guanosine
  modified_base 2: mod_base = OTHER; note = 2'O-methyl-cytidine
  modified_base 3: mod_base = OTHER; note = 2'O-methyl-adenosine
  modified_base 4: mod_base = OTHER; note = 2'O-methyl-adenosine
  modified_base 5: mod_base = OTHER; note = 2'O-methyl-guanosine
  modified_base 6: mod_base = OTHER; note = 2'O-methyl-adenosine
  modified_base 7: mod_base = OTHER; note = 2' Fluoro-guanosine
  modified_base 8: mod_base = OTHER; note = 2'O-methyl-cytidine
  modified_base 9: mod_base = OTHER; note = 2' Fluoro-cytidine
  modified_base 10: mod_base = OTHER; note = 2' Fluoro-guanosine
  modified_base 11: mod_base = OTHER; note = 2' Fluoro-guanosine
  modified_base 12: mod_base = OTHER; note = 2'O-methyl-adenosine
  modified_base 13: mod_base = OTHER; note = 2'O-methyl-uridine
  modified_base 14: mod_base = OTHER; note = 2'O-methyl-cytidine
  modified_base 15: mod_base = OTHER; note = 2'O-methyl-cytidine
  modified_base 16: mod_base = OTHER; note = 2'O-methyl-adenosine
  modified_base 17: mod_base = OTHER; note = 2'O-methyl-guanosine
  modified_base 18: mod_base = OTHER; note = 2'O-methyl-cytidine
  modified_base 19: mod_base = OTHER; note = 2'O-methyl-guanosine
  modified_base 20: mod_base = OTHER; note = 2'O-methyl-uridine
  modified_base 21: mod_base = OTHER; note = 2'O-methyl-cytidine
  modified_base 1..2: mod_base = OTHER; note = phosphorothioate linkage
  modified_base 2..3: mod_base = OTHER; note = phosphorothioate linkage
  modified_base 19..20: mod_base = OTHER; note = phosphorothioate linkage
  modified_base 20..21: mod_base = OTHER; note = phosphorothioate linkage
  source 1..21: mol_type = other RNA
gcaagagccggatccagcgtc

SEQ ID NO: 660 - RNA, 21 nt, synthetic construct
  misc_feature 1..21: note = siRNA sequence name:ETXS427
  modified_base 1: mod_base = OTHER; note = 2'O-methyl-guanosine
  modified_base 2: mod_base = OTHER; note = 2'O-methyl-guanosine
  modified_base 3: mod_base = OTHER; note = 2'O-methyl-cytidine
  modified_base 4: mod_base = OTHER; note = 2'O-methyl-adenosine
  modified_base 5: mod_base = OTHER; note = 2'O-methyl-adenosine
  modified_base 6: mod_base = OTHER; note = 2'O-methyl-guanosine
  modified_base 7: mod_base = OTHER; note = 2'Fluoro-adenosine
  modified_base 8: mod_base = OTHER; note = 2'O-methyl-guanosine
  modified_base 9: mod_base = OTHER; note = 2' Fluoro-cytidine
  modified_base 10: mod_base = OTHER; note = 2' Fluoro-cytidine
  modified_base 11: mod_base = OTHER; note = 2' Fluoro-guanosine
  modified_base 12: mod_base = OTHER; note = 2'O-methyl-guanosine
  modified_base 13: mod_base = OTHER; note = 2'O-methyl-adenosine
  modified_base 14: mod_base = OTHER; note = 2'O-methyl-uridine
  modified_base 15: mod_base = OTHER; note = 2'O-methyl-cytidine
  modified_base 16: mod_base = OTHER; note = 2'O-methyl-cytidine
  modified_base 17: mod_base = OTHER; note = 2'O-methyl-adenosine
  modified_base 18: mod_base = OTHER; note = 2'O-methyl-guanosine
  modified_base 19: mod_base = OTHER; note = 2'O-methyl-cytidine
  modified_base 20: mod_base = OTHER; note = 2'O-methyl-guanosine
  modified_base 21: mod_base = OTHER; note = 2'O-methyl-uridine
  modified_base 1..2: mod_base = OTHER; note = phosphorothioate linkage
  modified_base 2..3: mod_base = OTHER; note = phosphorothioate linkage
  modified_base 19..20: mod_base = OTHER; note = phosphorothioate linkage
  modified_base 20..21: mod_base = OTHER; note = phosphorothioate linkage
  source 1..21: mol_type = other RNA
ggcaagagccggatccagcgt

SEQ ID NO: 661 - RNA, 21 nt, synthetic construct
  misc_feature 1..21: note = siRNA sequence name:ETXS429
  modified_base 1: mod_base = OTHER; note = 2'O-methyl-uridine
  modified_base 2: mod_base = OTHER; note = 2'O-methyl-guanosine
  modified_base 3: mod_base = OTHER; note = 2'O-methyl-guanosine
  modified_base 4: mod_base = OTHER; note = 2'O-methyl-guanosine
  modified_base 5: mod_base = OTHER; note = 2'O-methyl-guanosine
  modified_base 6: mod_base = OTHER; note = 2'O-methyl-uridine
  modified_base 7: mod_base = OTHER; note = 2' Fluoro-uridine
  modified_base 8: mod_base = OTHER; note = 2'O-methyl-cytidine
  modified_base 9: mod_base = OTHER; note = 2'Fluoro-adenosine
  modified_base 10: mod_base = OTHER; note = 2' Fluoro-uridine
  modified_base 11: mod_base = OTHER; note = 2' Fluoro-guanosine
  modified_base 12: mod_base = OTHER; note = 2'O-methyl-cytidine
  modified_base 13: mod_base = OTHER; note = 2'O-methyl-cytidine
  modified_base 14: mod_base = OTHER; note = 2'O-methyl-guanosine
  modified_base 15: mod_base = OTHER; note = 2'O-methyl-cytidine
  modified_base 16: mod_base = OTHER; note = 2'O-methyl-uridine
  modified_base 17: mod_base = OTHER; note = 2'O-methyl-guanosine
  modified_base 18: mod_base = OTHER; note = 2'O-methyl-uridine
  modified_base 19: mod_base = OTHER; note = 2'O-methyl-cytidine
  modified_base 20: mod_base = OTHER; note = 2'O-methyl-cytidine
  modified_base 21: mod_base = OTHER; note = 2'O-methyl-adenosine
  modified_base 1..2: mod_base = OTHER; note = phosphorothioate linkage
  modified_base 2..3: mod_base = OTHER; note = phosphorothioate linkage
  modified_base 19..20: mod_base = OTHER; note = phosphorothioate linkage
  modified_base 20..21: mod_base = OTHER; note = phosphorothioate linkage
  source 1..21: mol_type = other RNA
tggggttcatgccgctgtcca

SEQ ID NO: 662 - RNA, 19 nt, synthetic construct
  misc_feature 1..19: note = siRNA sequence name:ETXS431
  modified_base 1: mod_base = OTHER; note = 2'Fluoro-adenosine
  modified_base 2: mod_base = OTHER; note = 2'O-methyl-adenosine
  modified_base 3: mod_base = OTHER; note = 2' Fluoro-uridine
  modified_base 4: mod_base = OTHER; note = 2'O-methyl-adenosine
  modified_base 5: mod_base = OTHER; note = 2'Fluoro-adenosine
  modified_base 6: mod_base = OTHER; note = 2'O-methyl-adenosine
  modified_base 7: mod_base = OTHER; note = 2' Fluoro-uridine
  modified_base 8: mod_base = OTHER; note = 2'O-methyl-uridine
  modified_base 9: mod_base = OTHER; note = 2' Fluoro-cytidine
  modified_base 10: mod_base = OTHER; note = 2'O-methyl-cytidine
  modified_base 11: mod_base = OTHER; note = 2' Fluoro-cytidine
  modified_base 12: mod_base = OTHER; note = 2'O-methyl-adenosine
  modified_base 13: mod_base = OTHER; note = 2' Fluoro-guanosine
  modified_base 14: mod_base = OTHER; note = 2'O-methyl-uridine
  modified_base 15: mod_base = OTHER; note = 2' Fluoro-guanosine
  modified_base 16: mod_base = OTHER; note = 2'O-methyl-guanosine
  modified_base 17: mod_base = OTHER; note = 2'Fluoro-adenosine
  modified_base 18: mod_base = OTHER; note = 2'O-methyl-adenosine
  modified_base 19: mod_base = OTHER; note = 2'Fluoro-adenosine
  modified_base 1..2: mod_base = OTHER; note = phosphorothioate linkage
  modified_base 2..3: mod_base = OTHER; note = phosphorothioate linkage
  modified_base 17..18: mod_base = OTHER; note = phosphorothioate linkage
  modified_base 18..19: mod_base = OTHER; note = phosphorothioate linkage
  source 1..19: mol_type = other RNA
aataaattcccagtggaaa

SEQ ID NO: 663 - RNA, 19 nt, synthetic construct
  misc_feature 1..19: note = siRNA sequence name:ETXS433
  modified_base 1: mod_base = OTHER; note = 2' Fluoro-guanosine
  modified_base 2: mod_base = OTHER; note = 2'O-methyl-cytidine
  modified_base 3: mod_base = OTHER; note = 2'Fluoro-adenosine
  modified_base 4: mod_base = OTHER; note = 2'O-methyl-uridine
  modified_base 5: mod_base = OTHER; note = 2' Fluoro-cytidine
  modified_base 6: mod_base = OTHER; note = 2'O-methyl-uridine
  modified_base 7: mod_base = OTHER; note = 2'Fluoro-adenosine
  modified_base 8: mod_base = OTHER; note = 2'O-methyl-cytidine
  modified_base 9: mod_base = OTHER; note = 2' Fluoro-uridine
  modified_base 10: mod_base = OTHER; note = 2'O-methyl-uridine
  modified_base 11: mod_base = OTHER; note = 2' Fluoro-cytidine
  modified_base 12: mod_base = OTHER; note = 2'O-methyl-adenosine
  modified_base 13: mod_base = OTHER; note = 2'Fluoro-adenosine
  modified_base 14: mod_base = OTHER; note = 2'O-methyl-adenosine
  modified_base 15: mod_base = OTHER; note = 2' Fluoro-guanosine
  modified_base 16: mod_base = OTHER; note = 2'O-methyl-guanosine
  modified_base 17: mod_base = OTHER; note = 2'Fluoro-adenosine
  modified_base 18: mod_base = OTHER; note = 2'O-methyl-uridine
  modified_base 19: mod_base = OTHER; note = 2' Fluoro-cytidine
  modified_base 1..2: mod_base = OTHER; note = phosphorothioate linkage
  modified_base 2..3: mod_base = OTHER; note = phosphorothioate linkage
  modified_base 17..18: mod_base = OTHER; note = phosphorothioate linkage
  modified_base 18..19: mod_base = OTHER; note = phosphorothioate linkage
  source 1..19: mol_type = other RNA
gcatctacttcaaaggatc

SEQ ID NO: 664 - RNA, 19 nt, synthetic construct
  misc_feature 1..19: note = siRNA sequence name:ETXS435
  modified_base 1: mod_base = OTHER; note = 2' Fluoro-uridine
  modified_base 2: mod_base = OTHER; note = 2'O-methyl-guanosine
  modified_base 3: mod_base = OTHER; note = 2' Fluoro-cytidine
  modified_base 4: mod_base = OTHER; note = 2'O-methyl-adenosine
  modified_base 5: mod_base = OTHER; note = 2' Fluoro-uridine
  modified_base 6: mod_base = OTHER; note = 2'O-methyl-cytidine
  modified_base 7: mod_base = OTHER; note = 2' Fluoro-uridine
  modified_base 8: mod_base = OTHER; note = 2'O-methyl-adenosine
  modified_base 9: mod_base = OTHER; note = 2' Fluoro-cytidine
  modified_base 10: mod_base = OTHER; note = 2'O-methyl-uridine
  modified_base 11: mod_base = OTHER; note = 2' Fluoro-uridine
  modified_base 12: mod_base = OTHER; note = 2'O-methyl-cytidine
  modified_base 13: mod_base = OTHER; note = 2'Fluoro-adenosine
  modified_base 14: mod_base = OTHER; note = 2'O-methyl-adenosine
  modified_base 15: mod_base = OTHER; note = 2'Fluoro-adenosine
  modified_base 16: mod_base = OTHER; note = 2'O-methyl-guanosine
  modified_base 17: mod_base = OTHER; note = 2' Fluoro-guanosine
  modified_base 18: mod_base = OTHER; note = 2'O-methyl-adenosine
  modified_base 19: mod_base = OTHER; note = 2' Fluoro-uridine
  modified_base 1..2: mod_base = OTHER; note = phosphorothioate linkage
  modified_base 2..3: mod_base = OTHER; note = phosphorothioate linkage
  modified_base 17..18: mod_base = OTHER; note = phosphorothioate linkage
  modified_base 18..19: mod_base = OTHER; note = phosphorothioate linkage
  source 1..19: mol_type = other RNA
tgcatctacttcaaaggat

SEQ ID NO: 665 - RNA, 19 nt, synthetic construct
  misc_feature 1..19: note = siRNA sequence name:ETXS437
  modified_base 1: mod_base = OTHER; note = 2' Fluoro-guanosine
  modified_base 2: mod_base = OTHER; note = 2'O-methyl-adenosine
  modified_base 3: mod_base = OTHER; note = 2' Fluoro-guanosine
  modified_base 4: mod_base = OTHER; note = 2'O-methyl-adenosine
  modified_base 5: mod_base = OTHER; note = 2' Fluoro-guanosine
  modified_base 6: mod_base = OTHER; note = 2'O-methyl-adenosine
  modified_base 7: mod_base = OTHER; note = 2' Fluoro-cytidine
  modified_base 8: mod_base = OTHER; note = 2'O-methyl-cytidine
  modified_base 9: mod_base = OTHER; note = 2' Fluoro-cytidine
  modified_base 10: mod_base = OTHER; note = 2'O-methyl-adenosine
  modified_base 11: mod_base = OTHER; note = 2' Fluoro-uridine
  modified_base 12: mod_base = OTHER; note = 2'O-methyl-guanosine
  modified_base 13: mod_base = OTHER; note = 2'Fluoro-adenosine
  modified_base 14: mod_base = OTHER; note = 2'O-methyl-adenosine
  modified_base 15: mod_base = OTHER; note = 2' Fluoro-cytidine
  modified_base 16: mod_base = OTHER; note = 2'O-methyl-adenosine
  modified_base 17: mod_base = OTHER; note = 2'Fluoro-adenosine
  modified_base 18: mod_base = OTHER; note = 2'O-methyl-guanosine
  modified_base 19: mod_base = OTHER; note = 2' Fluoro-uridine
  modified_base 1..2: mod_base = OTHER; note = phosphorothioate linkage
  modified_base 2..3: mod_base = OTHER; note = phosphorothioate linkage
  modified_base 17..18: mod_base = OTHER; note = phosphorothioate linkage
  modified_base 18..19: mod_base = OTHER; note = phosphorothioate linkage
  source 1..19: mol_type = other RNA
gagagacccatgaacaagt

SEQ ID NO: 666 - RNA, 19 nt, synthetic construct
  misc_feature 1..19: note = siRNA sequence name:ETXS439
  modified_base 1: mod_base = OTHER; note = 2' Fluoro-uridine
  modified_base 2: mod_base = OTHER; note = 2'O-methyl-guanosine
  modified_base 3: mod_base = OTHER; note = 2'Fluoro-adenosine
  modified_base 4: mod_base = OTHER; note = 2'O-methyl-adenosine
  modified_base 5: mod_base = OTHER; note = 2' Fluoro-uridine
  modified_base 6: mod_base = OTHER; note = 2'O-methyl-adenosine
  modified_base 7: mod_base = OTHER; note = 2'Fluoro-adenosine
  modified_base 8: mod_base = OTHER; note = 2'O-methyl-adenosine
  modified_base 9: mod_base = OTHER; note = 2' Fluoro-uridine
  modified_base 10: mod_base = OTHER; note = 2'O-methyl-uridine
  modified_base 11: mod_base = OTHER; note = 2' Fluoro-cytidine
  modified_base 12: mod_base = OTHER; note = 2'O-methyl-cytidine
  modified_base 13: mod_base = OTHER; note = 2' Fluoro-cytidine
  modified_base 14: mod_base = OTHER; note = 2'O-methyl-adenosine
  modified_base 15: mod_base = OTHER; note = 2' Fluoro-guanosine
  modified_base 16: mod_base = OTHER; note = 2'O-methyl-uridine
  modified_base 17: mod_base = OTHER; note = 2' Fluoro-guanosine
  modified_base 18: mod_base = OTHER; note = 2'O-methyl-guanosine
  modified_base 19: mod_base = OTHER; note = 2'Fluoro-adenosine
  modified_base 1..2: mod_base = OTHER; note = phosphorothioate linkage
  modified_base 2..3: mod_base = OTHER; note = phosphorothioate linkage
  modified_base 17..18: mod_base = OTHER; note = phosphorothioate linkage
  modified_base 18..19: mod_base = OTHER; note = phosphorothioate linkage
  source 1..19: mol_type = other RNA
tgaataaattcccagtgga

SEQ ID NO: 667 - RNA, 19 nt, synthetic construct
  misc_feature 1..19: note = siRNA sequence name:ETXS441
  modified_base 1: mod_base = OTHER; note = 2'Fluoro-adenosine
  modified_base 2: mod_base = OTHER; note = 2'O-methyl-guanosine
  modified_base 3: mod_base = OTHER; note = 2' Fluoro-guanosine
  modified_base 4: mod_base = OTHER; note = 2'O-methyl-adenosine
  modified_base 5: mod_base = OTHER; note = 2' Fluoro-guanosine
  modified_base 6: mod_base = OTHER; note = 2'O-methyl-guanosine
  modified_base 7: mod_base = OTHER; note = 2'Fluoro-adenosine
  modified_base 8: mod_base = OTHER; note = 2'O-methyl-adenosine
  modified_base 9: mod_base = OTHER; note = 2' Fluoro-uridine
  modified_base 10: mod_base = OTHER; note = 2'O-methyl-uridine
  modified_base 11: mod_base = OTHER; note = 2' Fluoro-uridine
  modified_base 12: mod_base = OTHER; note = 2'O-methyl-uridine
  modified_base 13: mod_base = OTHER; note = 2' Fluoro-guanosine
  modified_base 14: mod_base = OTHER; note = 2'O-methyl-guanosine
  modified_base 15: mod_base = OTHER; note = 2' Fluoro-guanosine
  modified_base 16: mod_base = OTHER; note = 2'O-methyl-uridine
  modified_base 17: mod_base = OTHER; note = 2'Fluoro-adenosine
  modified_base 18: mod_base = OTHER; note = 2'O-methyl-cytidine
  modified_base 19: mod_base = OTHER; note = 2'Fluoro-adenosine
  modified_base 1..2: mod_base = OTHER; note = phosphorothioate linkage
  modified_base 2..3: mod_base = OTHER; note = phosphorothioate linkage
  modified_base 17..18: mod_base = OTHER; note = phosphorothioate linkage
  modified_base 18..19: mod_base = OTHER; note = phosphorothioate linkage
  source 1..19: mol_type = other RNA
aggaggaattttgggtaca

SEQ ID NO: 668 - RNA, 19 nt, synthetic construct
  misc_feature 1..19: note = siRNA sequence name:ETXS443
  modified_base 1: mod_base = OTHER; note = 2' Fluoro-uridine
  modified_base 2: mod_base = OTHER; note = 2'O-methyl-guanosine
  modified_base 3: mod_base = OTHER; note = 2' Fluoro-cytidine
  modified_base 4: mod_base = OTHER; note = 2'O-methyl-cytidine
  modified_base 5: mod_base = OTHER; note = 2' Fluoro-uridine
  modified_base 6: mod_base = OTHER; note = 2'O-methyl-guanosine
  modified_base 7: mod_base = OTHER; note = 2' Fluoro-cytidine
  modified_base 8: mod_base = OTHER; note = 2'O-methyl-uridine
  modified_base 9: mod_base = OTHER; note = 2' Fluoro-cytidine
  modified_base 10: mod_base = OTHER; note = 2'O-methyl-uridine
  modified_base 11: mod_base = OTHER; note = 2' Fluoro-uridine
  modified_base 12: mod_base = OTHER; note = 2'O-methyl-cytidine
  modified_base 13: mod_base = OTHER; note = 2'Fluoro-adenosine
  modified_base 14: mod_base = OTHER; note = 2'O-methyl-uridine
  modified_base 15: mod_base = OTHER; note = 2' Fluoro-guanosine
  modified_base 16: mod_base = OTHER; note = 2'O-methyl-guanosine
  modified_base 17: mod_base = OTHER; note = 2' Fluoro-guanosine
  modified_base 18: mod_base = OTHER; note = 2'O-methyl-adenosine
  modified_base 19: mod_base = OTHER; note = 2'Fluoro-adenosine
  modified_base 1..2: mod_base = OTHER; note = phosphorothioate linkage
  modified_base 2..3: mod_base = OTHER; note = phosphorothioate linkage
  modified_base 17..18: mod_base = OTHER; note = phosphorothioate linkage
  modified_base 18..19: mod_base = OTHER; note = phosphorothioate linkage
  source 1..19: mol_type = other RNA
tgcctgctcttcatgggaa

SEQ ID NO: 669 - RNA, 19 nt, synthetic construct
  misc_feature 1..19: note = siRNA sequence name:ETXS445
  modified_base 1: mod_base = OTHER; note = 2' Fluoro-cytidine
  modified_base 2: mod_base = OTHER; note = 2'O-methyl-cytidine
  modified_base 3: mod_base = OTHER; note = 2'Fluoro-adenosine
  modified_base 4: mod_base = OTHER; note = 2'O-methyl-adenosine
  modified_base 5: mod_base = OTHER; note = 2' Fluoro-guanosine
  modified_base 6: mod_base = OTHER; note = 2'O-methyl-guanosine
  modified_base 7: mod_base = OTHER; note = 2' Fluoro-guanosine
  modified_base 8: mod_base = OTHER; note = 2'O-methyl-cytidine
  modified_base 9: mod_base = OTHER; note = 2' Fluoro-cytidine
  modified_base 10: mod_base = OTHER; note = 2'O-methyl-uridine
  modified_base 11: mod_base = OTHER; note = 2' Fluoro-cytidine
  modified_base 12: mod_base = OTHER; note = 2'O-methyl-adenosine
  modified_base 13: mod_base = OTHER; note = 2' Fluoro-uridine
  modified_base 14: mod_base = OTHER; note = 2'O-methyl-adenosine
  modified_base 15: mod_base = OTHER; note = 2'Fluoro-adenosine
  modified_base 16: mod_base = OTHER; note = 2'O-methyl-adenosine
  modified_base 17: mod_base = OTHER; note = 2'Fluoro-adenosine
  modified_base 18: mod_base = OTHER; note = 2'O-methyl-guanosine
  modified_base 19: mod_base = OTHER; note = 2'Fluoro-adenosine
  modified_base 1..2: mod_base = OTHER; note = phosphorothioate linkage
  modified_base 2..3: mod_base = OTHER; note = phosphorothioate linkage
  modified_base 17..18: mod_base = OTHER; note = phosphorothioate linkage
  modified_base 18..19: mod_base = OTHER; note = phosphorothioate linkage
  source 1..19: mol_type = other RNA
ccaagggcctcataaaaga

SEQ ID NO: 670 - RNA, 19 nt, synthetic construct
  misc_feature 1..19: note = siRNA sequence name:ETXS447
  modified_base 1: mod_base = OTHER; note = 2' Fluoro-uridine
  modified_base 2: mod_base = OTHER; note = 2'O-methyl-uridine
  modified_base 3: mod_base = OTHER; note = 2' Fluoro-uridine
  modified_base 4: mod_base = OTHER; note = 2'O-methyl-adenosine
  modified_base 5: mod_base = OTHER; note = 2' Fluoro-uridine
  modified_base 6: mod_base = OTHER; note = 2'O-methyl-adenosine
  modified_base 7: mod_base = OTHER; note = 2' Fluoro-uridine
  modified_base 8: mod_base = OTHER; note = 2'O-methyl-cytidine
  modified_base 9: mod_base = OTHER; note = 2' Fluoro-cytidine
  modified_base 10: mod_base = OTHER; note = 2'O-methyl-adenosine
  modified_base 11: mod_base = OTHER; note = 2' Fluoro-guanosine
  modified_base 12: mod_base = OTHER; note = 2'O-methyl-adenosine
  modified_base 13: mod_base = OTHER; note = 2'Fluoro-adenosine
  modified_base 14: mod_base = OTHER; note = 2'O-methyl-guanosine
  modified_base 15: mod_base = OTHER; note = 2' Fluoro-cytidine
  modified_base 16: mod_base = OTHER; note = 2'O-methyl-adenosine
  modified_base 17: mod_base = OTHER; note = 2' Fluoro-guanosine
  modified_base 18: mod_base = OTHER; note = 2'O-methyl-uridine
  modified_base 19: mod_base = OTHER; note = 2' Fluoro-uridine
  modified_base 1..2: mod_base = OTHER; note = phosphorothioate linkage
  modified_base 2..3: mod_base = OTHER; note = phosphorothioate linkage
  modified_base 17..18: mod_base = OTHER; note = phosphorothioate linkage
  modified_base 18..19: mod_base = OTHER; note = phosphorothioate linkage
  source 1..19: mol_type = other RNA
tttatatccagaagcagtt

SEQ ID NO: 671 - RNA, 19 nt, synthetic construct
  misc_feature 1..19: note = siRNA sequence name:ETXS449
  modified_base 1: mod_base = OTHER; note = 2'Fluoro-adenosine
  modified_base 2: mod_base = OTHER; note = 2'O-methyl-cytidine
  modified_base 3: mod_base = OTHER; note = 2' Fluoro-uridine
  modified_base 4: mod_base = OTHER; note = 2'O-methyl-guanosine
  modified_base 5: mod_base = OTHER; note = 2' Fluoro-cytidine
  modified_base 6: mod_base = OTHER; note = 2'O-methyl-adenosine
  modified_base 7: mod_base = OTHER; note = 2' Fluoro-uridine
  modified_base 8: mod_base = OTHER; note = 2'O-methyl-cytidine
  modified_base 9: mod_base = OTHER; note = 2' Fluoro-uridine
  modified_base 10: mod_base = OTHER; note = 2'O-methyl-adenosine
  modified_base 11: mod_base = OTHER; note = 2' Fluoro-cytidine
  modified_base 12: mod_base = OTHER; note = 2'O-methyl-uridine
  modified_base 13: mod_base = OTHER; note = 2' Fluoro-uridine
  modified_base 14: mod_base = OTHER; note = 2'O-methyl-cytidine
  modified_base 15: mod_base = OTHER; note = 2'Fluoro-adenosine
  modified_base 16: mod_base = OTHER; note = 2'O-methyl-adenosine
  modified_base 17: mod_base = OTHER; note = 2'Fluoro-adenosine
  modified_base 18: mod_base = OTHER; note = 2'O-methyl-guanosine
  modified_base 19: mod_base = OTHER; note = 2' Fluoro-guanosine
  modified_base 1..2: mod_base = OTHER; note = phosphorothioate linkage
  modified_base 2..3: mod_base = OTHER; note = phosphorothioate linkage
  modified_base 17..18: mod_base = OTHER; note = phosphorothioate linkage
  modified_base 18..19: mod_base = OTHER; note = phosphorothioate linkage
  source 1..19: mol_type = other RNA
actgcatctacttcaaagg

SEQ ID NO: 672 - RNA, 19 nt, synthetic construct
  misc_feature 1..19: note = siRNA sequence name:ETXS451
  modified_base 1: mod_base = OTHER; note = 2' Fluoro-guanosine
  modified_base 2: mod_base = OTHER; note = 2'O-methyl-cytidine
  modified_base 3: mod_base = OTHER; note = 2' Fluoro-cytidine
  modified_base 4: mod_base = OTHER; note = 2'O-methyl-guanosine
  modified_base 5: mod_base = OTHER; note = 2' Fluoro-guanosine
  modified_base 6: mod_base = OTHER; note = 2'O-methyl-adenosine
  modified_base 7: mod_base = OTHER; note = 2' Fluoro-uridine
  modified_base 8: mod_base = OTHER; note = 2'O-methyl-cytidine
  modified_base 9: mod_base = OTHER; note = 2' Fluoro-cytidine
  modified_base 10: mod_base = OTHER; note = 2'O-methyl-adenosine
  modified_base 11: mod_base = OTHER; note = 2' Fluoro-guanosine
  modified_base 12: mod_base = OTHER; note = 2'O-methyl-cytidine
  modified_base 13: mod_base = OTHER; note = 2' Fluoro-guanosine
  modified_base 14: mod_base = OTHER; note = 2'O-methyl-uridine
  modified_base 15: mod_base = OTHER; note = 2' Fluoro-cytidine
  modified_base 16: mod_base = OTHER; note = 2'O-methyl-uridine
  modified_base 17: mod_base = OTHER; note = 2' Fluoro-uridine
  modified_base 18: mod_base = OTHER; note = 2'O-methyl-adenosine
  modified_base 19: mod_base = OTHER; note = 2'Fluoro-adenosine
  modified_base 1..2: mod_base = OTHER; note = phosphorothioate linkage
  modified_base 2..3: mod_base = OTHER; note = phosphorothioate linkage
  modified_base 17..18: mod_base = OTHER; note = phosphorothioate linkage
  modified_base 18..19: mod_base = OTHER; note = phosphorothioate linkage
  source 1..19: mol_type = other RNA
gccggatccagcgtcttaa

SEQ ID NO: 673 - RNA, 19 nt, synthetic construct
  misc_feature 1..19: note = siRNA sequence name:ETXS453
  modified_base 1: mod_base = OTHER; note = 2' Fluoro-cytidine
  modified_base 2: mod_base = OTHER; note = 2'O-methyl-cytidine
  modified_base 3: mod_base = OTHER; note = 2'Fluoro-adenosine
  modified_base 4: mod_base = OTHER; note = 2'O-methyl-guanosine
  modified_base 5: mod_base = OTHER; note = 2' Fluoro-cytidine
  modified_base 6: mod_base = OTHER; note = 2'O-methyl-guanosine
  modified_base 7: mod_base = OTHER; note = 2' Fluoro-uridine
  modified_base 8: mod_base = OTHER; note = 2'O-methyl-cytidine
  modified_base 9: mod_base = OTHER; note = 2' Fluoro-uridine
  modified_base 10: mod_base = OTHER; note = 2'O-methyl-uridine
  modified_base 11: mod_base = OTHER; note = 2'Fluoro-adenosine
  modified_base 12: mod_base = OTHER; note = 2'O-methyl-adenosine
  modified_base 13: mod_base = OTHER; note = 2' Fluoro-cytidine
  modified_base 14: mod_base = OTHER; note = 2'O-methyl-adenosine
  modified_base 15: mod_base = OTHER; note = 2' Fluoro-uridine
  modified_base 16: mod_base = OTHER; note = 2'O-methyl-cytidine
  modified_base 17: mod_base = OTHER; note = 2' Fluoro-cytidine
  modified_base 18: mod_base = OTHER; note = 2'O-methyl-uridine
  modified_base 19: mod_base = OTHER; note = 2' Fluoro-cytidine
  modified_base 1..2: mod_base = OTHER; note = phosphorothioate linkage
  modified_base 2..3: mod_base = OTHER; note = phosphorothioate linkage
  modified_base 17..18: mod_base = OTHER; note = phosphorothioate linkage
  modified_base 18..19: mod_base = OTHER; note = phosphorothioate linkage
  source 1..19: mol_type = other RNA
ccagcgtcttaacatcctc

SEQ ID NO: 674 - RNA, 19 nt, synthetic construct
  misc_feature 1..19: note = siRNA sequence name:ETXS455
  modified_base 1: mod_base = OTHER; note = 2'Fluoro-adenosine
  modified_base 2: mod_base = OTHER; note = 2'O-methyl-adenosine
  modified_base 3: mod_base = OTHER; note = 2'Fluoro-adenosine
  modified_base 4: mod_base = OTHER; note = 2'O-methyl-adenosine
  modified_base 5: mod_base = OTHER; note = 2'Fluoro-adenosine
  modified_base 6: mod_base = OTHER; note = 2'O-methyl-guanosine
  modified_base 7: mod_base = OTHER; note = 2' Fluoro-cytidine
  modified_base 8: mod_base = OTHER; note = 2'O-methyl-adenosine
  modified_base 9: mod_base = OTHER; note = 2' Fluoro-uridine
  modified_base 10: mod_base = OTHER; note = 2'O-methyl-guanosine
  modified_base 11: mod_base = OTHER; note = 2'Fluoro-adenosine
  modified_base 12: mod_base = OTHER; note = 2'O-methyl-cytidine
  modified_base 13: mod_base = OTHER; note = 2'Fluoro-adenosine
  modified_base 14: mod_base = OTHER; note = 2'O-methyl-adenosine
  modified_base 15: mod_base = OTHER; note = 2'Fluoro-adenosine
  modified_base 16: mod_base = OTHER; note = 2'O-methyl-cytidine
  modified_base 17: mod_base = OTHER; note = 2'Fluoro-adenosine
  modified_base 18: mod_base = OTHER; note = 2'O-methyl-guanosine
  modified_base 19: mod_base = OTHER; note = 2'Fluoro-adenosine
  modified_base 1..2: mod_base = OTHER; note = phosphorothioate linkage
  modified_base 2..3: mod_base = OTHER; note = phosphorothioate linkage
  modified_base 17..18: mod_base = OTHER; note = phosphorothioate linkage
  modified_base 18..19: mod_base = OTHER; note = phosphorothioate linkage
  source 1..19: mol_type = other RNA
aaaaagcatgacaaacaga

SEQ ID NO: 675 - RNA, 19 nt, synthetic construct
  misc_feature 1..19: note = siRNA sequence name:ETXS457
  modified_base 1: mod_base = OTHER; note = 2' Fluoro-guanosine
  modified_base 2: mod_base = OTHER; note = 2'O-methyl-guanosine
  modified_base 3: mod_base = OTHER; note = 2'Fluoro-adenosine
  modified_base 4: mod_base = OTHER; note = 2'O-methyl-guanosine
  modified_base 5: mod_base = OTHER; note = 2' Fluoro-guanosine
  modified_base 6: mod_base = OTHER; note = 2'O-methyl-adenosine
  modified_base 7: mod_base = OTHER; note = 2'Fluoro-adenosine
  modified_base 8: mod_base = OTHER; note = 2'O-methyl-uridine
  modified_base 9: mod_base = OTHER; note = 2' Fluoro-uridine
  modified_base 10: mod_base = OTHER; note = 2'O-methyl-uridine
  modified_base 11: mod_base = OTHER; note = 2' Fluoro-uridine
  modified_base 12: mod_base = OTHER; note = 2'O-methyl-guanosine
  modified_base 13: mod_base = OTHER; note = 2' Fluoro-guanosine
  modified_base 14: mod_base = OTHER; note = 2'O-methyl-guanosine
  modified_base 15: mod_base = OTHER; note = 2' Fluoro-uridine
  modified_base 16: mod_base = OTHER; note = 2'O-methyl-adenosine
  modified_base 17: mod_base = OTHER; note = 2' Fluoro-cytidine
  modified_base 18: mod_base = OTHER; note = 2'O-methyl-adenosine
  modified_base 19: mod_base = OTHER; note = 2' Fluoro-cytidine
  modified_base 1..2: mod_base = OTHER; note = phosphorothioate linkage
  modified_base 2..3: mod_base = OTHER; note = phosphorothioate linkage
  modified_base 17..18: mod_base = OTHER; note = phosphorothioate linkage
  modified_base 18..19: mod_base = OTHER; note = phosphorothioate linkage
  source 1..19: mol_type = other RNA
ggaggaattttgggtacac

SEQ ID NO: 676 - RNA, 19 nt, synthetic construct
  misc_feature 1..19: note = siRNA sequence name:ETXS459
  modified_base 1: mod_base = OTHER; note = 2'Fluoro-adenosine
  modified_base 2: mod_base = OTHER; note = 2'O-methyl-cytidine
  modified_base 3: mod_base = OTHER; note = 2' Fluoro-cytidine
  modified_base 4: mod_base = OTHER; note = 2'O-methyl-adenosine
  modified_base 5: mod_base = OTHER; note = 2' Fluoro-cytidine
  modified_base 6: mod_base = OTHER; note = 2'O-methyl-adenosine
  modified_base 7: mod_base = OTHER; note = 2'Fluoro-adenosine
  modified_base 8: mod_base = OTHER; note = 2'O-methyl-cytidine
  modified_base 9: mod_base = OTHER; note = 2' Fluoro-uridine
  modified_base 10: mod_base = OTHER; note = 2'O-methyl-uridine
  modified_base 11: mod_base = OTHER; note = 2' Fluoro-cytidine
  modified_base 12: mod_base = OTHER; note = 2'O-methyl-cytidine
  modified_base 13: mod_base = OTHER; note = 2' Fluoro-guanosine
  modified_base 14: mod_base = OTHER; note = 2'O-methyl-guanosine
  modified_base 15: mod_base = OTHER; note = 2' Fluoro-cytidine
  modified_base 16: mod_base = OTHER; note = 2'O-methyl-uridine
  modified_base 17: mod_base = OTHER; note = 2' Fluoro-guanosine
  modified_base 18: mod_base = OTHER; note = 2'O-methyl-adenosine
  modified_base 19: mod_base = OTHER; note = 2'Fluoro-adenosine
  modified_base 1..2: mod_base = OTHER; note = phosphorothioate linkage
  modified_base 2..3: mod_base = OTHER; note = phosphorothioate linkage
  modified_base 17..18: mod_base = OTHER; note = phosphorothioate linkage
  modified_base 18..19: mod_base = OTHER; note = phosphorothioate linkage
  source 1..19: mol_type = other RNA
accacaacttccggctgaa

SEQ ID NO: 677 - RNA, 19 nt, synthetic construct
  misc_feature 1..19: note = siRNA sequence name:ETXS461
  modified_base 1: mod_base = OTHER; note = 2' Fluoro-cytidine
  modified_base 2: mod_base = OTHER; note = 2'O-methyl-adenosine
  modified_base 3: mod_base = OTHER; note = 2'Fluoro-adenosine
  modified_base 4: mod_base = OTHER; note = 2'O-methyl-adenosine
  modified_base 5: mod_base = OTHER; note = 2'Fluoro-adenosine
  modified_base 6: mod_base = OTHER; note = 2'O-methyl-adenosine
  modified_base 7: mod_base = OTHER; note = 2'Fluoro-adenosine
  modified_base 8: mod_base = OTHER; note = 2'O-methyl-guanosine
  modified_base 9: mod_base = OTHER; note = 2' Fluoro-cytidine
  modified_base 10: mod_base = OTHER; note = 2'O-methyl-adenosine
  modified_base 11: mod_base = OTHER; note = 2' Fluoro-uridine
  modified_base 12: mod_base = OTHER; note = 2'O-methyl-guanosine
  modified_base 13: mod_base = OTHER; note = 2'Fluoro-adenosine
  modified_base 14: mod_base = OTHER; note = 2'O-methyl-cytidine
  modified_base 15: mod_base = OTHER; note = 2'Fluoro-adenosine
  modified_base 16: mod_base = OTHER; note = 2'O-methyl-adenosine
  modified_base 17: mod_base = OTHER; note = 2'Fluoro-adenosine
  modified_base 18: mod_base = OTHER; note = 2'O-methyl-cytidine
  modified_base 19: mod_base = OTHER; note = 2'Fluoro-adenosine
  modified_base 1..2: mod_base = OTHER; note = phosphorothioate linkage
  modified_base 2..3: mod_base = OTHER; note = phosphorothioate linkage
  modified_base 17..18: mod_base = OTHER; note = phosphorothioate linkage
  modified_base 18..19: mod_base = OTHER; note = phosphorothioate linkage
  source 1..19: mol_type = other RNA
caaaaaagcatgacaaaca

SEQ ID NO: 678 - RNA, 19 nt, synthetic construct
  misc_feature 1..19: note = siRNA sequence name:ETXS463
  modified_base 1: mod_base = OTHER; note = 2'Fluoro-adenosine
  modified_base 2: mod_base = OTHER; note = 2'O-methyl-uridine
  modified_base 3: mod_base = OTHER; note = 2'Fluoro-adenosine
  modified_base 4: mod_base = OTHER; note = 2'O-methyl-adenosine
  modified_base 5: mod_base = OTHER; note = 2'Fluoro-adenosine
  modified_base 6: mod_base = OTHER; note = 2'O-methyl-uridine
  modified_base 7: mod_base = OTHER; note = 2' Fluoro-uridine
  modified_base 8: mod_base = OTHER; note = 2'O-methyl-cytidine
  modified_base 9: mod_base = OTHER; note = 2' Fluoro-cytidine
  modified_base 10: mod_base = OTHER; note = 2'O-methyl-cytidine
  modified_base 11: mod_base = OTHER; note = 2'Fluoro-adenosine
  modified_base 12: mod_base = OTHER; note = 2'O-methyl-guanosine
  modified_base 13: mod_base = OTHER; note = 2' Fluoro-uridine
  modified_base 14: mod_base = OTHER; note = 2'O-methyl-guanosine
  modified_base 15: mod_base = OTHER; note = 2' Fluoro-guanosine
  modified_base 16: mod_base = OTHER; note = 2'O-methyl-adenosine
  modified_base 17: mod_base = OTHER; note = 2'Fluoro-adenosine
  modified_base 18: mod_base = OTHER; note = 2'O-methyl-adenosine
  modified_base 19: mod_base = OTHER; note = 2' Fluoro-uridine
  modified_base 1..2: mod_base = OTHER; note = phosphorothioate linkage
  modified_base 2..3: mod_base = OTHER; note = phosphorothioate linkage
  modified_base 17..18: mod_base = OTHER; note = phosphorothioate linkage
  modified_base 18..19: mod_base = OTHER; note = phosphorothioate linkage
  source 1..19: mol_type = other RNA
ataaattcccagtggaaat

SEQ ID NO: 679 - RNA, 19 nt, synthetic construct
  misc_feature 1..19: note = siRNA sequence name:ETXS465
  modified_base 1: mod_base = OTHER; note = 2' Fluoro-guanosine
  modified_base 2: mod_base = OTHER; note = 2'O-methyl-cytidine
  modified_base 3: mod_base = OTHER; note = 2'Fluoro-adenosine
  modified_base 4: mod_base = OTHER; note = 2'O-methyl-uridine
  modified_base 5: mod_base = OTHER; note = 2' Fluoro-cytidine
  modified_base 6: mod_base = OTHER; note = 2'O-methyl-adenosine
  modified_base 7: mod_base = OTHER; note = 2' Fluoro-guanosine
  modified_base 8: mod_base = OTHER; note = 2'O-methyl-cytidine
  modified_base 9: mod_base = OTHER; note = 2'Fluoro-adenosine
  modified_base 10: mod_base = OTHER; note = 2'O-methyl-uridine
  modified_base 11: mod_base = OTHER; note = 2' Fluoro-guanosine
  modified_base 12: mod_base = OTHER; note = 2'O-methyl-cytidine
  modified_base 13: mod_base = OTHER; note = 2' Fluoro-uridine
  modified_base 14: mod_base = OTHER; note = 2'O-methyl-adenosine
  modified_base 15: mod_base = OTHER; note = 2'Fluoro-adenosine
  modified_base 16: mod_base = OTHER; note = 2'O-methyl-uridine
  modified_base 17: mod_base = OTHER; note = 2' Fluoro-uridine
  modified_base 18: mod_base = OTHER; note = 2'O-methyl-guanosine
  modified_base 19: mod_base = OTHER; note = 2' Fluoro-uridine
  modified_base 1..2: mod_base = OTHER; note = phosphorothioate linkage
  modified_base 2..3: mod_base = OTHER; note = phosphorothioate linkage
  modified_base 17..18: mod_base = OTHER; note = phosphorothioate linkage
  modified_base 18..19: mod_base = OTHER; note = phosphorothioate linkage
  source 1..19: mol_type = other RNA
gcatcagcatgctaattgt

SEQ ID NO: 680 - RNA, 19 nt, synthetic construct
  misc_feature 1..19: note = siRNA sequence name:ETXS467
  modified_base 1: mod_base = OTHER; note = 2'Fluoro-adenosine
  modified_base 2: mod_base = OTHER; note = 2'O-methyl-adenosine
  modified_base 3: mod_base = OTHER; note = 2'Fluoro-adenosine
  modified_base 4: mod_base = OTHER; note = 2'O-methyl-guanosine
  modified_base 5: mod_base = OTHER; note = 2' Fluoro-cytidine
  modified_base 6: mod_base = OTHER; note = 2'O-methyl-adenosine
  modified_base 7: mod_base = OTHER; note = 2' Fluoro-uridine
  modified_base 8: mod_base = OTHER; note = 2'O-methyl-guanosine
  modified_base 9: mod_base = OTHER; note = 2'Fluoro-adenosine
  modified_base 10: mod_base = OTHER; note = 2'O-methyl-cytidine
  modified_base 11: mod_base = OTHER; note = 2'Fluoro-adenosine
  modified_base 12: mod_base = OTHER; note = 2'O-methyl-adenosine
  modified_base 13: mod_base = OTHER; note = 2'Fluoro-adenosine
  modified_base 14: mod_base = OTHER; note = 2'O-methyl-cytidine
  modified_base 15: mod_base = OTHER; note = 2'Fluoro-adenosine
  modified_base 16: mod_base = OTHER; note = 2'O-methyl-guanosine
  modified_base 17: mod_base = OTHER; note = 2'Fluoro-adenosine
  modified_base 18: mod_base = OTHER; note = 2'O-methyl-adenosine
  modified_base 19: mod_base = OTHER; note = 2' Fluoro-cytidine
  modified_base 1..2: mod_base = OTHER; note = phosphorothioate linkage
  modified_base 2..3: mod_base = OTHER; note = phosphorothioate linkage
  modified_base 17..18: mod_base = OTHER; note = phosphorothioate linkage
  modified_base 18..19: mod_base = OTHER; note = phosphorothioate linkage
  source 1..19: mol_type = other RNA
aaagcatgacaaacagaac

SEQ ID NO: 681 - RNA, 19 nt, synthetic construct
  misc_feature 1..19: note = siRNA sequence name:ETXS469
  modified_base 1: mod_base = OTHER; note = 2' Fluoro-guanosine
  modified_base 2: mod_base = OTHER; note = 2'O-methyl-uridine
  modified_base 3: mod_base = OTHER; note = 2'Fluoro-adenosine
  modified_base 4: mod_base = OTHER; note = 2'O-methyl-uridine
  modified_base 5: mod_base = OTHER; note = 2' Fluoro-uridine
  modified_base 6: mod_base = OTHER; note = 2'O-methyl-adenosine
  modified_base 7: mod_base = OTHER; note = 2' Fluoro-cytidine
  modified_base 8: mod_base = OTHER; note = 2'O-methyl-uridine
  modified_base 9: mod_base = OTHER; note = 2' Fluoro-uridine
  modified_base 10: mod_base = OTHER; note = 2'O-methyl-uridine
  modified_base 11: mod_base = OTHER; note = 2' Fluoro-guanosine
  modified_base 12: mod_base = OTHER; note = 2'O-methyl-cytidine
  modified_base 13: mod_base = OTHER; note = 2' Fluoro-uridine
  modified_base 14: mod_base = OTHER; note = 2'O-methyl-guanosine
  modified_base 15: mod_base = OTHER; note = 2'Fluoro-adenosine
  modified_base 16: mod_base = OTHER; note = 2'O-methyl-guanosine
  modified_base 17: mod_base = OTHER; note = 2' Fluoro-guanosine
  modified_base 18: mod_base = OTHER; note = 2'O-methyl-cytidine
  modified_base 19: mod_base = OTHER; note = 2' Fluoro-cytidine
  modified_base 1..2: mod_base = OTHER; note = phosphorothioate linkage
  modified_base 2..3: mod_base = OTHER; note = phosphorothioate linkage
  modified_base 17..18: mod_base = OTHER; note = phosphorothioate linkage
  modified_base 18..19: mod_base = OTHER; note = phosphorothioate linkage
  source 1..19: mol_type = other RNA
gtattactttgctgaggcc

SEQ ID NO: 682 - RNA, 21 nt, synthetic construct
  misc_feature 1..21: note = siRNA sequence name:ETXS471
  modified_base 1: mod_base = OTHER; note = 2'O-methyl-uridine
  modified_base 2: mod_base = OTHER; note = 2'O-methyl-guanosine
  modified_base 3: mod_base = OTHER; note = 2'O-methyl-adenosine
  modified_base 4: mod_base = OTHER; note = 2'O-methyl-adenosine
  modified_base 5: mod_base = OTHER; note = 2'O-methyl-uridine
  modified_base 6: mod_base = OTHER; note = 2'O-methyl-adenosine
  modified_base 7: mod_base = OTHER; note = 2'Fluoro-adenosine
  modified_base 8: mod_base = OTHER; note = 2'Fluoro-adenosine
  modified_base 9: mod_base = OTHER; note = 2' Fluoro-uridine
  modified_base 10: mod_base = OTHER; note = 2' Fluoro-uridine
  modified_base 11: mod_base = OTHER; note = 2' Fluoro-cytidine
  modified_base 12: mod_base = OTHER; note = 2'O-methyl-cytidine
  modified_base 13: mod_base = OTHER; note = 2'O-methyl-cytidine
  modified_base 14: mod_base = OTHER; note = 2'O-methyl-adenosine
  modified_base 15: mod_base = OTHER; note = 2'O-methyl-guanosine
  modified_base 16: mod_base = OTHER; note = 2'O-methyl-uridine
  modified_base 17: mod_base = OTHER; note = 2'O-methyl-guanosine
  modified_base 18: mod_base = OTHER; note = 2'O-methyl-guanosine
  modified_base 19: mod_base = OTHER; note = 2'Fluoro-adenosine
  modified_base 20: mod_base = OTHER; note = 2'O-methyl-adenosine
  modified_base 21: mod_base = OTHER; note = 2'O-methyl-adenosine
  modified_base 1..2: mod_base = OTHER; note = phosphorothioate linkage
  modified_base 2..3: mod_base = OTHER; note = phosphorothioate linkage
  modified_base 19..20: mod_base = OTHER; note = phosphorothioate linkage
  modified_base 20..21: mod_base = OTHER; note = phosphorothioate linkage
  source 1..21: mol_type = other RNA
tgaataaattcccagtggaaa

SEQ ID NO: 683 - RNA, 21 nt, synthetic construct
  misc_feature 1..21: note = siRNA sequence name:ETXS473
  modified_base 1: mod_base = OTHER; note = 2'O-methyl-cytidine
  modified_base 2: mod_base = OTHER; note = 2'O-methyl-uridine
  modified_base 3: mod_base = OTHER; note = 2'O-methyl-guanosine
  modified_base 4: mod_base = OTHER; note = 2'O-methyl-cytidine
  modified_base 5: mod_base = OTHER; note = 2'O-methyl-adenosine
  modified_base 6: mod_base = OTHER; note = 2'O-methyl-uridine
  modified_base 7: mod_base = OTHER; note = 2' Fluoro-cytidine
  modified_base 8: mod_base = OTHER; note = 2' Fluoro-uridine
  modified_base 9: mod_base = OTHER; note = 2'Fluoro-adenosine
  modified_base 10: mod_base = OTHER; note = 2' Fluoro-cytidine
  modified_base 11: mod_base = OTHER; note = 2' Fluoro-uridine
  modified_base 12: mod_base = OTHER; note = 2'O-methyl-uridine
  modified_base 13: mod_base = OTHER; note = 2'O-methyl-cytidine
  modified_base 14: mod_base = OTHER; note = 2'O-methyl-adenosine
  modified_base 15: mod_base = OTHER; note = 2'O-methyl-adenosine
  modified_base 16: mod_base = OTHER; note = 2'O-methyl-adenosine
  modified_base 17: mod_base = OTHER; note = 2'O-methyl-guanosine
  modified_base 18: mod_base = OTHER; note = 2'O-methyl-guanosine
  modified_base 19: mod_base = OTHER; note = 2'Fluoro-adenosine
  modified_base 20: mod_base = OTHER; note = 2'O-methyl-uridine
  modified_base 21: mod_base = OTHER; note = 2'O-methyl-cytidine
  modified_base 1..2: mod_base = OTHER; note = phosphorothioate linkage
  modified_base 2..3: mod_base = OTHER; note = phosphorothioate linkage
  modified_base 19..20: mod_base = OTHER; note = phosphorothioate linkage
  modified_base 20..21: mod_base = OTHER; note = phosphorothioate linkage
  source 1..21: mol_type = other RNA
ctgcatctacttcaaaggatc

SEQ ID NO: 684 - RNA, 21 nt, synthetic construct
  misc_feature 1..21: note = siRNA sequence name:ETXS475
  modified_base 1: mod_base = OTHER; note = 2'O-methyl-adenosine
  modified_base 2: mod_base = OTHER; note = 2'O-methyl-cytidine
  modified_base 3: mod_base = OTHER; note = 2'O-methyl-uridine
  modified_base 4: mod_base = OTHER; note = 2'O-methyl-guanosine
  modified_base 5: mod_base = OTHER; note = 2'O-methyl-cytidine
  modified_base 6: mod_base = OTHER; note = 2'O-methyl-adenosine
  modified_base 7: mod_base = OTHER; note = 2' Fluoro-uridine
  modified_base 8: mod_base = OTHER; note = 2' Fluoro-cytidine
  modified_base 9: mod_base = OTHER; note = 2' Fluoro-uridine
  modified_base 10: mod_base = OTHER; note = 2'Fluoro-adenosine
  modified_base 11: mod_base = OTHER; note = 2' Fluoro-cytidine
  modified_base 12: mod_base = OTHER; note = 2'O-methyl-uridine
  modified_base 13: mod_base = OTHER; note = 2'O-methyl-uridine
  modified_base 14: mod_base = OTHER; note = 2'O-methyl-cytidine
  modified_base 15: mod_base = OTHER; note = 2'O-methyl-adenosine
  modified_base 16: mod_base = OTHER; note = 2'O-methyl-adenosine
  modified_base 17: mod_base = OTHER; note = 2'O-methyl-adenosine
  modified_base 18: mod_base = OTHER; note = 2'O-methyl-guanosine
  modified_base 19: mod_base = OTHER; note = 2' Fluoro-guanosine
  modified_base 20: mod_base = OTHER; note = 2'O-methyl-adenosine
  modified_base 21: mod_base = OTHER; note = 2'O-methyl-uridine
  modified_base 1..2: mod_base = OTHER; note = phosphorothioate linkage
  modified_base 2..3: mod_base = OTHER; note = phosphorothioate linkage
  modified_base 19..20: mod_base = OTHER; note = phosphorothioate linkage
  modified_base 20..21: mod_base = OTHER; note = phosphorothioate linkage
  source 1..21: mol_type = other RNA
actgcatctacttcaaaggat

SEQ ID NO: 685 - RNA, 21 nt, synthetic construct
  misc_feature 1..21: note = siRNA sequence name:ETXS477
  modified_base 1: mod_base = OTHER; note = 2'O-methyl-guanosine
  modified_base 2: mod_base = OTHER; note = 2'O-methyl-guanosine
  modified_base 3: mod_base = OTHER; note = 2'O-methyl-guanosine
  modified_base 4: mod_base = OTHER; note = 2'O-methyl-adenosine
  modified_base 5: mod_base = OTHER; note = 2'O-methyl-guanosine
  modified_base 6: mod_base = OTHER; note = 2'O-methyl-adenosine
  modified_base 7: mod_base = OTHER; note = 2' Fluoro-guanosine
  modified_base 8: mod_base = OTHER; note = 2'Fluoro-adenosine
  modified_base 9: mod_base = OTHER; note = 2' Fluoro-cytidine
  modified_base 10: mod_base = OTHER; note = 2' Fluoro-cytidine
  modified_base 11: mod_base = OTHER; note = 2' Fluoro-cytidine
  modified_base 12: mod_base = OTHER; note = 2'O-methyl-adenosine
  modified_base 13: mod_base = OTHER; note = 2'O-methyl-uridine
  modified_base 14: mod_base = OTHER; note = 2'O-methyl-guanosine
  modified_base 15: mod_base = OTHER; note = 2'O-methyl-adenosine
  modified_base 16: mod_base = OTHER; note = 2'O-methyl-adenosine
  modified_base 17: mod_base = OTHER; note = 2'O-methyl-cytidine
  modified_base 18: mod_base = OTHER; note = 2'O-methyl-adenosine
  modified_base 19: mod_base = OTHER; note = 2'Fluoro-adenosine
  modified_base 20: mod_base = OTHER; note = 2'O-methyl-guanosine
  modified_base 21: mod_base = OTHER; note = 2'O-methyl-uridine
  modified_base 1..2: mod_base = OTHER; note = phosphorothioate linkage
  modified_base 2..3: mod_base = OTHER; note = phosphorothioate linkage
  modified_base 19..20: mod_base = OTHER; note = phosphorothioate linkage
  modified_base 20..21: mod_base = OTHER; note = phosphorothioate linkage
  source 1..21: mol_type = other RNA
gggagagacccatgaacaagt

SEQ ID NO: 686 - RNA, 21 nt, synthetic construct
  misc_feature 1..21: note = siRNA sequence name:ETXS479
  modified_base 1: mod_base = OTHER; note = 2'O-methyl-guanosine
  modified_base 2: mod_base = OTHER; note = 2'O-methyl-guanosine
  modified_base 3: mod_base = OTHER; note = 2'O-methyl-uridine
  modified_base 4: mod_base = OTHER; note = 2'O-methyl-guanosine
  modified_base 5: mod_base = OTHER; note = 2'O-methyl-adenosine
  modified_base 6: mod_base = OTHER; note = 2'O-methyl-adenosine
  modified_base 7: mod_base = OTHER; note = 2' Fluoro-uridine
  modified_base 8: mod_base = OTHER; note = 2'Fluoro-adenosine
  modified_base 9: mod_base = OTHER; note = 2'Fluoro-adenosine
  modified_base 10: mod_base = OTHER; note = 2'Fluoro-adenosine
  modified_base 11: mod_base = OTHER; note = 2' Fluoro-uridine
  modified_base 12: mod_base = OTHER; note = 2'O-methyl-uridine
  modified_base 13: mod_base = OTHER; note = 2'O-methyl-cytidine
  modified_base 14: mod_base = OTHER; note = 2'O-methyl-cytidine
  modified_base 15: mod_base = OTHER; note = 2'O-methyl-cytidine
  modified_base 16: mod_base = OTHER; note = 2'O-methyl-adenosine
  modified_base 17: mod_base = OTHER; note = 2'O-methyl-guanosine
  modified_base 18: mod_base = OTHER; note = 2'O-methyl-uridine
  modified_base 19: mod_base = OTHER; note = 2' Fluoro-guanosine
  modified_base 20: mod_base = OTHER; note = 2'O-methyl-guanosine
  modified_base 21: mod_base = OTHER; note = 2'O-methyl-adenosine
  modified_base 1..2: mod_base = OTHER; note = phosphorothioate linkage
  modified_base 2..3: mod_base = OTHER; note = phosphorothioate linkage
  modified_base 19..20: mod_base = OTHER; note = phosphorothioate linkage
  modified_base 20..21: mod_base = OTHER; note = phosphorothioate linkage
  source 1..21: mol_type = other RNA
ggtgaataaattcccagtgga

SEQ ID NO: 687 - RNA, 21 nt, synthetic construct
  misc_feature 1..21: note = siRNA sequence name:ETXS481
  modified_base 1: mod_base = OTHER; note = 2'O-methyl-uridine
  modified_base 2: mod_base = OTHER; note = 2'O-methyl-cytidine
  modified_base 3: mod_base = OTHER; note = 2'O-methyl-adenosine
  modified_base 4: mod_base = OTHER; note = 2'O-methyl-guanosine
  modified_base 5: mod_base = OTHER; note = 2'O-methyl-guanosine
  modified_base 6: mod_base = OTHER; note = 2'O-methyl-adenosine
  modified_base 7: mod_base = OTHER; note = 2' Fluoro-guanosine
  modified_base 8: mod_base = OTHER; note = 2' Fluoro-guanosine
  modified_base 9: mod_base = OTHER; note = 2'Fluoro-adenosine
  modified_base 10: mod_base = OTHER; note = 2'Fluoro-adenosine
  modified_base 11: mod_base = OTHER; note = 2' Fluoro-uridine
  modified_base 12: mod_base = OTHER; note = 2'O-methyl-uridine
  modified_base 13: mod_base = OTHER; note = 2'O-methyl-uridine
  modified_base 14: mod_base = OTHER; note = 2'O-methyl-uridine
  modified_base 15: mod_base = OTHER; note = 2'O-methyl-guanosine
  modified_base 16: mod_base = OTHER; note = 2'O-methyl-guanosine
  modified_base 17: mod_base = OTHER; note = 2'O-methyl-guanosine
  modified_base 18: mod_base = OTHER; note = 2'O-methyl-uridine
  modified_base 19: mod_base = OTHER; note = 2'Fluoro-adenosine
  modified_base 20: mod_base = OTHER; note = 2'O-methyl-cytidine
  modified_base 21: mod_base = OTHER; note = 2'O-methyl-adenosine
  modified_base 1..2: mod_base = OTHER; note = phosphorothioate linkage
  modified_base 2..3: mod_base = OTHER; note = phosphorothioate linkage
  modified_base 19..20: mod_base = OTHER; note = phosphorothioate linkage
  modified_base 20..21: mod_base = OTHER; note = phosphorothioate linkage
  source 1..21: mol_type = other RNA
tcaggaggaattttgggtaca

SEQ ID NO: 688 - RNA, 21 nt, synthetic construct
  misc_feature 1..21: note = siRNA sequence name:ETXS483
  modified_base 1: mod_base = OTHER; note = 2'O-methyl-guanosine
  modified_base 2: mod_base = OTHER; note = 2'O-methyl-cytidine
  modified_base 3: mod_base = OTHER; note = 2'O-methyl-uridine
  modified_base 4: mod_base = OTHER; note = 2'O-methyl-guanosine
  modified_base 5: mod_base = OTHER; note = 2'O-methyl-cytidine
  modified_base 6: mod_base = OTHER; note = 2'O-methyl-cytidine
  modified_base 7: mod_base = OTHER; note = 2' Fluoro-uridine
  modified_base 8: mod_base = OTHER; note = 2' Fluoro-guanosine
  modified_base 9: mod_base = OTHER; note = 2' Fluoro-cytidine
  modified_base 10: mod_base = OTHER; note = 2' Fluoro-uridine
  modified_base 11: mod_base = OTHER; note = 2' Fluoro-cytidine
  modified_base 12: mod_base = OTHER; note = 2'O-methyl-uridine
  modified_base 13: mod_base = OTHER; note = 2'O-methyl-uridine
  modified_base 14: mod_base = OTHER; note = 2'O-methyl-cytidine
  modified_base 15: mod_base = OTHER; note = 2'O-methyl-adenosine
  modified_base 16: mod_base = OTHER; note = 2'O-methyl-uridine
  modified_base 17: mod_base = OTHER; note = 2'O-methyl-guanosine
  modified_base 18: mod_base = OTHER; note = 2'O-methyl-guanosine
  modified_base 19: mod_base = OTHER; note = 2' Fluoro-guanosine
  modified_base 20: mod_base = OTHER; note = 2'O-methyl-adenosine
  modified_base 21: mod_base = OTHER; note = 2'O-methyl-adenosine
  modified_base 1..2: mod_base = OTHER; note = phosphorothioate linkage
  modified_base 2..3: mod_base = OTHER; note = phosphorothioate linkage
  modified_base 19..20: mod_base = OTHER; note = phosphorothioate linkage
  modified_base 20..21: mod_base = OTHER; note = phosphorothioate linkage
  source 1..21: mol_type = other RNA
gctgcctgctcttcatgggaa

SEQ ID NO: 689 - RNA, 21 nt, synthetic construct
  misc_feature 1..21: note = siRNA sequence name:ETXS485
  modified_base 1: mod_base = OTHER; note = 2'O-methyl-cytidine
  modified_base 2: mod_base = OTHER; note = 2'O-methyl-adenosine
  modified_base 3: mod_base = OTHER; note = 2'O-methyl-cytidine
  modified_base 4: mod_base = OTHER; note = 2'O-methyl-cytidine
  modified_base 5: mod_base = OTHER; note = 2'O-methyl-adenosine
  modified_base 6: mod_base = OTHER; note = 2'O-methyl-adenosine
  modified_base 7: mod_base = OTHER; note = 2' Fluoro-guanosine
  modified_base 8: mod_base = OTHER; note = 2' Fluoro-guanosine
  modified_base 9: mod_base = OTHER; note = 2' Fluoro-guanosine
  modified_base 10: mod_base = OTHER; note = 2' Fluoro-cytidine
  modified_base 11: mod_base = OTHER; note = 2' Fluoro-cytidine
  modified_base 12: mod_base = OTHER; note = 2'O-methyl-uridine
  modified_base 13: mod_base = OTHER; note = 2'O-methyl-cytidine
  modified_base 14: mod_base = OTHER; note = 2'O-methyl-adenosine
  modified_base 15: mod_base = OTHER; note = 2'O-methyl-uridine
  modified_base 16: mod_base = OTHER; note = 2'O-methyl-adenosine
  modified_base 17: mod_base = OTHER; note = 2'O-methyl-adenosine
  modified_base 18: mod_base = OTHER; note = 2'O-methyl-adenosine
  modified_base 19: mod_base = OTHER; note = 2'Fluoro-adenosine
  modified_base 20: mod_base = OTHER; note = 2'O-methyl-guanosine
  modified_base 21: mod_base = OTHER; note = 2'O-methyl-adenosine
  modified_base 1..2: mod_base = OTHER; note = phosphorothioate linkage
  modified_base 2..3: mod_base = OTHER; note = phosphorothioate linkage
  modified_base 19..20: mod_base = OTHER; note = phosphorothioate linkage
  modified_base 20..21: mod_base = OTHER; note = phosphorothioate linkage
  source 1..21: mol_type = other RNA
caccaagggcctcataaaaga

SEQ ID NO: 690 - RNA, 21 nt, synthetic construct
  misc_feature 1..21: note = siRNA sequence name:ETXS487
  modified_base 1: mod_base = OTHER; note = 2'O-methyl-cytidine
  modified_base 2: mod_base = OTHER; note = 2'O-methyl-cytidine
  modified_base 3: mod_base = OTHER; note = 2'O-methyl-uridine
  modified_base 4: mod_base = OTHER; note = 2'O-methyl-uridine
  modified_base 5: mod_base = OTHER; note = 2'O-methyl-uridine
  modified_base 6: mod_base = OTHER; note = 2'O-methyl-adenosine
  modified_base 7: mod_base = OTHER; note = 2' Fluoro-uridine
  modified_base 8: mod_base = OTHER; note = 2'Fluoro-adenosine
  modified_base 9: mod_base = OTHER; note = 2' Fluoro-uridine
  modified_base 10: mod_base = OTHER; note = 2' Fluoro-cytidine
  modified_base 11: mod_base = OTHER; note = 2' Fluoro-cytidine
  modified_base 12: mod_base = OTHER; note = 2'O-methyl-adenosine
  modified_base 13: mod_base = OTHER; note = 2'O-methyl-guanosine
  modified_base 14: mod_base = OTHER; note = 2'O-methyl-adenosine
  modified_base 15: mod_base = OTHER; note = 2'O-methyl-adenosine
  modified_base 16: mod_base = OTHER; note = 2'O-methyl-guanosine
  modified_base 17: mod_base = OTHER; note = 2'O-methyl-cytidine
  modified_base 18: mod_base = OTHER; note = 2'O-methyl-adenosine
  modified_base 19: mod_base = OTHER; note = 2' Fluoro-guanosine
  modified_base 20: mod_base = OTHER; note = 2'O-methyl-uridine
  modified_base 21: mod_base = OTHER; note = 2'O-methyl-uridine
  modified_base 1..2: mod_base = OTHER; note = phosphorothioate linkage
  modified_base 2..3: mod_base = OTHER; note = phosphorothioate linkage
  modified_base 19..20: mod_base = OTHER; note = phosphorothioate linkage
  modified_base 20..21: mod_base = OTHER; note = phosphorothioate linkage
  source 1..21: mol_type = other RNA
cctttatatccagaagcagtt

SEQ ID NO: 691 - RNA, 21 nt, synthetic construct
  misc_feature 1..21: note = siRNA sequence name:ETXS489
  modified_base 1: mod_base = OTHER; note = 2'O-methyl-cytidine
  modified_base 2: mod_base = OTHER; note = 2'O-methyl-adenosine
  modified_base 3: mod_base = OTHER; note = 2'O-methyl-adenosine
  modified_base 4: mod_base = OTHER; note = 2'O-methyl-cytidine
  modified_base 5: mod_base = OTHER; note = 2'O-methyl-uridine
  modified_base 6: mod_base = OTHER; note = 2'O-methyl-guanosine
  modified_base 7: mod_base = OTHER; note = 2' Fluoro-cytidine
  modified_base 8: mod_base = OTHER; note = 2'Fluoro-adenosine
  modified_base 9: mod_base = OTHER; note = 2' Fluoro-uridine
  modified_base 10: mod_base = OTHER; note = 2' Fluoro-cytidine
  modified_base 11: mod_base = OTHER; note = 2' Fluoro-uridine
  modified_base 12: mod_base = OTHER; note = 2'O-methyl-adenosine
  modified_base 13: mod_base = OTHER; note = 2'O-methyl-cytidine
  modified_base 14: mod_base = OTHER; note = 2'O-methyl-uridine
  modified_base 15: mod_base = OTHER; note = 2'O-methyl-uridine
  modified_base 16: mod_base = OTHER; note = 2'O-methyl-cytidine
  modified_base 17: mod_base = OTHER; note = 2'O-methyl-adenosine
  modified_base 18: mod_base = OTHER; note = 2'O-methyl-adenosine
  modified_base 19: mod_base = OTHER; note = 2'Fluoro-adenosine
  modified_base 20: mod_base = OTHER; note = 2'O-methyl-guanosine
  modified_base 21: mod_base = OTHER; note = 2'O-methyl-guanosine
  modified_base 1..2: mod_base = OTHER; note = phosphorothioate linkage
  modified_base 2..3: mod_base = OTHER; note = phosphorothioate linkage
  modified_base 19..20: mod_base = OTHER; note = phosphorothioate linkage
  modified_base 20..21: mod_base = OTHER; note = phosphorothioate linkage
  source 1..21: mol_type = other RNA
caactgcatctacttcaaagg

SEQ ID NO: 692 - RNA, 21 nt, synthetic construct
  misc_feature 1..21: note = siRNA sequence name:ETXS491
  modified_base 1: mod_base = OTHER; note = 2'O-methyl-guanosine
  modified_base 2: mod_base = OTHER; note = 2'O-methyl-adenosine
  modified_base 3: mod_base = OTHER; note = 2'O-methyl-guanosine
  modified_base 4: mod_base = OTHER; note = 2'O-methyl-cytidine
  modified_base 5: mod_base = OTHER; note = 2'O-methyl-cytidine
  modified_base 6: mod_base = OTHER; note = 2'O-methyl-guanosine
  modified_base 7: mod_base = OTHER; note = 2' Fluoro-guanosine
  modified_base 8: mod_base = OTHER; note = 2'Fluoro-adenosine
  modified_base 9: mod_base = OTHER; note = 2' Fluoro-uridine
  modified_base 10: mod_base = OTHER; note = 2' Fluoro-cytidine
  modified_base 11: mod_base = OTHER; note = 2' Fluoro-cytidine
  modified_base 12: mod_base = OTHER; note = 2'O-methyl-adenosine
  modified_base 13: mod_base = OTHER; note = 2'O-methyl-guanosine
  modified_base 14: mod_base = OTHER; note = 2'O-methyl-cytidine
  modified_base 15: mod_base = OTHER; note = 2'O-methyl-guanosine
  modified_base 16: mod_base = OTHER; note = 2'O-methyl-uridine
  modified_base 17: mod_base = OTHER; note = 2'O-methyl-cytidine
  modified_base 18: mod_base = OTHER; note = 2'O-methyl-uridine
  modified_base 19: mod_base = OTHER; note = 2' Fluoro-uridine
  modified_base 20: mod_base = OTHER; note = 2'O-methyl-adenosine
  modified_base 21: mod_base = OTHER; note = 2'O-methyl-adenosine
  modified_base 1..2: mod_base = OTHER; note = phosphorothioate linkage
  modified_base 2..3: mod_base = OTHER; note = phosphorothioate linkage
  modified_base 19..20: mod_base = OTHER; note = phosphorothioate linkage
  modified_base 20..21: mod_base = OTHER; note = phosphorothioate linkage
  source 1..21: mol_type = other RNA
gagccggatccagcgtcttaa

SEQ ID NO: 693 - RNA, 21 nt, synthetic construct
  misc_feature 1..21: note = siRNA sequence name:ETXS493
  modified_base 1: mod_base = OTHER; note = 2'O-methyl-adenosine
  modified_base 2: mod_base = OTHER; note = 2'O-methyl-uridine
  modified_base 3: mod_base = OTHER; note = 2'O-methyl-cytidine
  modified_base 4: mod_base = OTHER; note = 2'O-methyl-cytidine
  modified_base 5: mod_base = OTHER; note = 2'O-methyl-adenosine
  modified_base 6: mod_base = OTHER; note = 2'O-methyl-guanosine
  modified_base 7: mod_base = OTHER; note = 2' Fluoro-cytidine
  modified_base 8: mod_base = OTHER; note = 2' Fluoro-guanosine
  modified_base 9: mod_base = OTHER; note = 2' Fluoro-uridine
  modified_base 10: mod_base = OTHER; note = 2' Fluoro-cytidine
  modified_base 11: mod_base = OTHER; note = 2' Fluoro-uridine
  modified_base 12: mod_base = OTHER; note = 2'O-methyl-uridine
  modified_base 13: mod_base = OTHER; note = 2'O-methyl-adenosine
  modified_base 14: mod_base = OTHER; note = 2'O-methyl-adenosine
  modified_base 15: mod_base = OTHER; note = 2'O-methyl-cytidine
  modified_base 16: mod_base = OTHER; note = 2'O-methyl-adenosine
  modified_base 17: mod_base = OTHER; note = 2'O-methyl-uridine
  modified_base 18: mod_base = OTHER; note = 2'O-methyl-cytidine
  modified_base 19: mod_base = OTHER; note = 2' Fluoro-cytidine
  modified_base 20: mod_base = OTHER; note = 2'O-methyl-uridine
  modified_base 21: mod_base = OTHER; note = 2'O-methyl-cytidine
  modified_base 1..2: mod_base = OTHER; note = phosphorothioate linkage
  modified_base 2..3: mod_base = OTHER; note = phosphorothioate linkage
  modified_base 19..20: mod_base = OTHER; note = phosphorothioate linkage
  modified_base 20..21: mod_base = OTHER; note = phosphorothioate linkage
  source 1..21: mol_type = other RNA
atccagcgtcttaacatcctc

SEQ ID NO: 694 - RNA, 21 nt, synthetic construct
  misc_feature 1..21: note = siRNA sequence name:ETXS495
  modified_base 1: mod_base = OTHER; note = 2'O-methyl-cytidine
  modified_base 2: mod_base = OTHER; note = 2'O-methyl-adenosine
  modified_base 3: mod_base = OTHER; note = 2'O-methyl-adenosine
  modified_base 4: mod_base = OTHER; note = 2'O-methyl-adenosine
  modified_base 5: mod_base = OTHER; note = 2'O-methyl-adenosine
  modified_base 6: mod_base = OTHER; note = 2'O-methyl-adenosine
  modified_base 7: mod_base = OTHER; note = 2'Fluoro-adenosine
  modified_base 8: mod_base = OTHER; note = 2' Fluoro-guanosine
  modified_base 9: mod_base = OTHER; note = 2' Fluoro-cytidine
  modified_base 10: mod_base = OTHER; note = 2'Fluoro-adenosine
  modified_base 11: mod_base = OTHER; note = 2' Fluoro-uridine
  modified_base 12: mod_base = OTHER; note = 2'O-methyl-guanosine
  modified_base 13: mod_base = OTHER; note = 2'O-methyl-adenosine
  modified_base 14: mod_base = OTHER; note = 2'O-methyl-cytidine
  modified_base 15: mod_base = OTHER; note = 2'O-methyl-adenosine
  modified_base 16: mod_base = OTHER; note = 2'O-methyl-adenosine
  modified_base 17: mod_base = OTHER; note = 2'O-methyl-adenosine
  modified_base 18: mod_base = OTHER; note = 2'O-methyl-cytidine
  modified_base 19: mod_base = OTHER; note = 2'Fluoro-adenosine
  modified_base 20: mod_base = OTHER; note = 2'O-methyl-guanosine
  modified_base 21: mod_base = OTHER; note = 2'O-methyl-adenosine
  modified_base 1..2: mod_base = OTHER; note = phosphorothioate linkage
  modified_base 2..3: mod_base = OTHER; note = phosphorothioate linkage
  modified_base 19..20: mod_base = OTHER; note = phosphorothioate linkage
  modified_base 20..21: mod_base = OTHER; note = phosphorothioate linkage
  source 1..21: mol_type = other RNA
caaaaaagcatgacaaacaga

SEQ ID NO: 695 - RNA, 21 nt, synthetic construct
  misc_feature 1..21: note = siRNA sequence name:ETXS497
  modified_base 1: mod_base = OTHER; note = 2'O-methyl-cytidine
  modified_base 2: mod_base = OTHER; note = 2'O-methyl-adenosine
  modified_base 3: mod_base = OTHER; note = 2'O-methyl-guanosine
  modified_base 4: mod_base = OTHER; note = 2'O-methyl-guanosine
  modified_base 5: mod_base = OTHER; note = 2'O-methyl-adenosine
  modified_base 6: mod_base = OTHER; note = 2'O-methyl-guanosine
  modified_base 7: mod_base = OTHER; note = 2' Fluoro-guanosine
  modified_base 8: mod_base = OTHER; note = 2'Fluoro-adenosine
  modified_base 9: mod_base = OTHER; note = 2'Fluoro-adenosine
  modified_base 10: mod_base = OTHER; note = 2' Fluoro-uridine
  modified_base 11: mod_base = OTHER; note = 2' Fluoro-uridine
  modified_base 12: mod_base = OTHER; note = 2'O-methyl-uridine
  modified_base 13: mod_base = OTHER; note = 2'O-methyl-uridine
  modified_base 14: mod_base = OTHER; note = 2'O-methyl-guanosine
  modified_base 15: mod_base = OTHER; note = 2'O-methyl-guanosine
  modified_base 16: mod_base = OTHER; note = 2'O-methyl-guanosine
  modified_base 17: mod_base = OTHER; note = 2'O-methyl-uridine
  modified_base 18: mod_base = OTHER; note = 2'O-methyl-adenosine
  modified_base 19: mod_base = OTHER; note = 2' Fluoro-cytidine
  modified_base 20: mod_base = OTHER; note = 2'O-methyl-adenosine
  modified_base 21: mod_base = OTHER; note = 2'O-methyl-cytidine
  modified_base 1..2: mod_base = OTHER; note = phosphorothioate linkage
  modified_base 2..3: mod_base = OTHER; note = phosphorothioate linkage
  modified_base 19..20: mod_base = OTHER; note = phosphorothioate linkage
  modified_base 20..21: mod_base = OTHER; note = phosphorothioate linkage
  source 1..21: mol_type = other RNA
caggaggaattttgggtacac

SEQ ID NO: 696 - RNA, 21 nt, synthetic construct
  misc_feature 1..21: note = siRNA sequence name:ETXS499
  modified_base 1: mod_base = OTHER; note = 2'O-methyl-cytidine
  modified_base 2: mod_base = OTHER; note = 2'O-methyl-adenosine
  modified_base 3: mod_base = OTHER; note = 2'O-methyl-adenosine
  modified_base 4: mod_base = OTHER; note = 2'O-methyl-cytidine
  modified_base 5: mod_base = OTHER; note = 2'O-methyl-cytidine
  modified_base 6: mod_base = OTHER; note = 2'O-methyl-adenosine
  modified_base 7: mod_base = OTHER; note = 2' Fluoro-cytidine
  modified_base 8: mod_base = OTHER; note = 2'Fluoro-adenosine
  modified_base 9: mod_base = OTHER; note = 2'Fluoro-adenosine
  modified_base 10: mod_base = OTHER; note = 2' Fluoro-cytidine
  modified_base 11: mod_base = OTHER; note = 2' Fluoro-uridine
  modified_base 12: mod_base = OTHER; note = 2'O-methyl-uridine
  modified_base 13: mod_base = OTHER; note = 2'O-methyl-cytidine
  modified_base 14: mod_base = OTHER; note = 2'O-methyl-cytidine
  modified_base 15: mod_base = OTHER; note = 2'O-methyl-guanosine
  modified_base 16: mod_base = OTHER; note = 2'O-methyl-guanosine
  modified_base 17: mod_base = OTHER; note = 2'O-methyl-cytidine
  modified_base 18: mod_base = OTHER; note = 2'O-methyl-uridine
  modified_base 19: mod_base = OTHER; note = 2' Fluoro-guanosine
  modified_base 20: mod_base = OTHER; note = 2'O-methyl-adenosine
  modified_base 21: mod_base = OTHER; note = 2'O-methyl-adenosine
  modified_base 1..2: mod_base = OTHER; note = phosphorothioate linkage
  modified_base 2..3: mod_base = OTHER; note = phosphorothioate linkage
  modified_base 19..20: mod_base = OTHER; note = phosphorothioate linkage
  modified_base 20..21: mod_base = OTHER; note = phosphorothioate linkage
  source 1..21: mol_type = other RNA
caaccacaacttccggctgaa

SEQ ID NO: 697 - RNA, 21 nt, synthetic construct
  misc_feature 1..21: note = siRNA sequence name:ETXS501
  modified_base 1: mod_base = OTHER; note = 2'O-methyl-guanosine
  modified_base 2: mod_base = OTHER; note = 2'O-methyl-guanosine
  modified_base 3: mod_base = OTHER; note = 2'O-methyl-cytidine
  modified_base 4: mod_base = OTHER; note = 2'O-methyl-adenosine
  modified_base 5: mod_base = OTHER; note = 2'O-methyl-adenosine
  modified_base 6: mod_base = OTHER; note = 2'O-methyl-adenosine
  modified_base 7: mod_base = OTHER; note = 2'Fluoro-adenosine
  modified_base 8: mod_base = OTHER; note = 2'Fluoro-adenosine
  modified_base 9: mod_base = OTHER; note = 2'Fluoro-adenosine
  modified_base 10: mod_base = OTHER; note = 2' Fluoro-guanosine
  modified_base 11: mod_base = OTHER; note = 2' Fluoro-cytidine
  modified_base 12: mod_base = OTHER; note = 2'O-methyl-adenosine
  modified_base 13: mod_base = OTHER; note = 2'O-methyl-uridine
  modified_base 14: mod_base = OTHER; note = 2'O-methyl-guanosine
  modified_base 15: mod_base = OTHER; note = 2'O-methyl-adenosine
  modified_base 16: mod_base = OTHER; note = 2'O-methyl-cytidine
  modified_base 17: mod_base = OTHER; note = 2'O-methyl-adenosine
  modified_base 18: mod_base = OTHER; note = 2'O-methyl-adenosine
  modified_base 19: mod_base = OTHER; note = 2'Fluoro-adenosine
  modified_base 20: mod_base = OTHER; note = 2'O-methyl-cytidine
  modified_base 21: mod_base = OTHER; note = 2'O-methyl-adenosine
  modified_base 1..2: mod_base = OTHER; note = phosphorothioate linkage
  modified_base 2..3: mod_base = OTHER; note = phosphorothioate linkage
  modified_base 19..20: mod_base = OTHER; note = phosphorothioate linkage
  modified_base 20..21: mod_base = OTHER; note = phosphorothioate linkage
  source 1..21: mol_type = other RNA
ggcaaaaaagcatgacaaaca

SEQ ID NO: 698 - RNA, 21 nt, synthetic construct
  misc_feature 1..21: note = siRNA sequence name:ETXS503
  modified_base 1: mod_base = OTHER; note = 2'O-methyl-guanosine
  modified_base 2: mod_base = OTHER; note = 2'O-methyl-adenosine
  modified_base 3: mod_base = OTHER; note = 2'O-methyl-adenosine
  modified_base 4: mod_base = OTHER; note = 2'O-methyl-uridine
  modified_base 5: mod_base = OTHER; note = 2'O-methyl-adenosine
  modified_base 6: mod_base = OTHER; note = 2'O-methyl-adenosine
  modified_base 7: mod_base = OTHER; note = 2'Fluoro-adenosine
  modified_base 8: mod_base = OTHER; note = 2' Fluoro-uridine
  modified_base 9: mod_base = OTHER; note = 2' Fluoro-uridine
  modified_base 10: mod_base = OTHER; note = 2' Fluoro-cytidine
  modified_base 11: mod_base = OTHER; note = 2' Fluoro-cytidine
  modified_base 12: mod_base = OTHER; note = 2'O-methyl-cytidine
  modified_base 13: mod_base = OTHER; note = 2'O-methyl-adenosine
  modified_base 14: mod_base = OTHER; note = 2'O-methyl-guanosine
  modified_base 15: mod_base = OTHER; note = 2'O-methyl-uridine
  modified_base 16: mod_base = OTHER; note = 2'O-methyl-guanosine
  modified_base 17: mod_base = OTHER; note = 2'O-methyl-guanosine
  modified_base 18: mod_base = OTHER; note = 2'O-methyl-adenosine
  modified_base 19: mod_base = OTHER; note = 2'Fluoro-adenosine
  modified_base 20: mod_base = OTHER; note = 2'O-methyl-adenosine
  modified_base 21: mod_base = OTHER; note = 2'O-methyl-uridine
  modified_base 1..2: mod_base = OTHER; note = phosphorothioate linkage
  modified_base 2..3: mod_base = OTHER; note = phosphorothioate linkage
  modified_base 19..20: mod_base = OTHER; note = phosphorothioate linkage
  modified_base 20..21: mod_base = OTHER; note = phosphorothioate linkage
  source 1..21: mol_type = other RNA
gaataaattcccagtggaaat

SEQ ID NO: 699 - RNA, 21 nt, synthetic construct
  misc_feature 1..21: note = siRNA sequence name:ETXS505
  modified_base 1: mod_base = OTHER; note = 2'O-methyl-guanosine
  modified_base 2: mod_base = OTHER; note = 2'O-methyl-guanosine
  modified_base 3: mod_base = OTHER; note = 2'O-methyl-guanosine
  modified_base 4: mod_base = OTHER; note = 2'O-methyl-cytidine
  modified_base 5: mod_base = OTHER; note = 2'O-methyl-adenosine
  modified_base 6: mod_base = OTHER; note = 2'O-methyl-uridine
  modified_base 7: mod_base = OTHER; note = 2' Fluoro-cytidine
  modified_base 8: mod_base = OTHER; note = 2'Fluoro-adenosine
  modified_base 9: mod_base = OTHER; note = 2' Fluoro-guanosine
  modified_base 10: mod_base = OTHER; note = 2' Fluoro-cytidine
  modified_base 11: mod_base = OTHER; note = 2'Fluoro-adenosine
  modified_base 12: mod_base = OTHER; note = 2'O-methyl-uridine
  modified_base 13: mod_base = OTHER; note = 2'O-methyl-guanosine
  modified_base 14: mod_base = OTHER; note = 2'O-methyl-cytidine
  modified_base 15: mod_base = OTHER; note = 2'O-methyl-uridine
  modified_base 16: mod_base = OTHER; note = 2'O-methyl-adenosine
  modified_base 17: mod_base = OTHER; note = 2'O-methyl-adenosine
  modified_base 18: mod_base = OTHER; note = 2'O-methyl-uridine
  modified_base 19: mod_base = OTHER; note = 2' Fluoro-uridine
  modified_base 20: mod_base = OTHER; note = 2'O-methyl-guanosine
  modified_base 21: mod_base = OTHER; note = 2'O-methyl-uridine
  modified_base 1..2: mod_base = OTHER; note = phosphorothioate linkage
  modified_base 2..3: mod_base = OTHER; note = phosphorothioate linkage
  modified_base 19..20: mod_base = OTHER; note = phosphorothioate linkage
  modified_base 20..21: mod_base = OTHER; note = phosphorothioate linkage
  source 1..21: mol_type = other RNA
gggcatcagcatgctaattgt

SEQ ID NO: 700 - RNA, 21 nt, synthetic construct
  misc_feature 1..21: note = siRNA sequence name:ETXS507
  modified_base 1: mod_base = OTHER; note = 2'O-methyl-adenosine
  modified_base 2: mod_base = OTHER; note = 2'O-methyl-adenosine
  modified_base 3: mod_base = OTHER; note = 2'O-methyl-adenosine
  modified_base 4: mod_base = OTHER; note = 2'O-methyl-adenosine
  modified_base 5: mod_base = OTHER; note = 2'O-methyl-adenosine
  modified_base 6: mod_base = OTHER; note = 2'O-methyl-guanosine
  modified_base 7: mod_base = OTHER; note = 2' Fluoro-cytidine
  modified_base 8: mod_base = OTHER; note = 2'Fluoro-adenosine
  modified_base 9: mod_base = OTHER; note = 2' Fluoro-uridine
  modified_base 10: mod_base = OTHER; note = 2' Fluoro-guanosine
  modified_base 11: mod_base = OTHER; note = 2'Fluoro-adenosine
  modified_base 12: mod_base = OTHER; note = 2'O-methyl-cytidine
  modified_base 13: mod_base = OTHER; note = 2'O-methyl-adenosine
  modified_base 14: mod_base = OTHER; note = 2'O-methyl-adenosine
  modified_base 15: mod_base = OTHER; note = 2'O-methyl-adenosine
  modified_base 16: mod_base = OTHER; note = 2'O-methyl-cytidine
  modified_base 17: mod_base = OTHER; note = 2'O-methyl-adenosine
  modified_base 18: mod_base = OTHER; note = 2'O-methyl-guanosine
  modified_base 19: mod_base = OTHER; note = 2'Fluoro-adenosine
  modified_base 20: mod_base = OTHER; note = 2'O-methyl-adenosine
  modified_base 21: mod_base = OTHER; note = 2'O-methyl-cytidine
  modified_base 1..2: mod_base = OTHER; note = phosphorothioate linkage
  modified_base 2..3: mod_base = OTHER; note = phosphorothioate linkage
  modified_base 19..20: mod_base = OTHER; note = phosphorothioate linkage
  modified_base 20..21: mod_base = OTHER; note = phosphorothioate linkage
  source 1..21: mol_type = other RNA
aaaaagcatgacaaacagaac

SEQ ID NO: 701 - RNA, 21 nt, synthetic construct
  misc_feature 1..21: note = siRNA sequence name:ETXS509
  modified_base 1: mod_base = OTHER; note = 2'O-methyl-guanosine
  modified_base 2: mod_base = OTHER; note = 2'O-methyl-adenosine
  modified_base 3: mod_base = OTHER; note = 2'O-methyl-guanosine
  modified_base 4: mod_base = OTHER; note = 2'O-methyl-uridine
  modified_base 5: mod_base = OTHER; note = 2'O-methyl-adenosine
  modified_base 6: mod_base = OTHER; note = 2'O-methyl-uridine
  modified_base 7: mod_base = OTHER; note = 2' Fluoro-uridine
  modified_base 8: mod_base = OTHER; note = 2'Fluoro-adenosine
  modified_base 9: mod_base = OTHER; note = 2' Fluoro-cytidine
  modified_base 10: mod_base = OTHER; note = 2' Fluoro-uridine
  modified_base 11: mod_base = OTHER; note = 2' Fluoro-uridine
  modified_base 12: mod_base = OTHER; note = 2'O-methyl-uridine
  modified_base 13: mod_base = OTHER; note = 2'O-methyl-guanosine
  modified_base 14: mod_base = OTHER; note = 2'O-methyl-cytidine
  modified_base 15: mod_base = OTHER; note = 2'O-methyl-uridine
  modified_base 16: mod_base = OTHER; note = 2'O-methyl-guanosine
  modified_base 17: mod_base = OTHER; note = 2'O-methyl-adenosine
  modified_base 18: mod_base = OTHER; note = 2'O-methyl-guanosine
  modified_base 19: mod_base = OTHER; note = 2' Fluoro-guanosine
  modified_base 20: mod_base = OTHER; note = 2'O-methyl-cytidine
  modified_base 21: mod_base = OTHER; note = 2'O-methyl-cytidine
  modified_base 1..2: mod_base = OTHER; note = phosphorothioate linkage
  modified_base 2..3: mod_base = OTHER; note = phosphorothioate linkage
  modified_base 19..20: mod_base = OTHER; note = phosphorothioate linkage
  modified_base 20..21: mod_base = OTHER; note = phosphorothioate linkage
  source 1..21: mol_type = other RNA
gagtattactttgctgaggcc

SEQ ID NO: 702 - RNA, 21 nt, synthetic construct
  misc_feature 1..21: note = siRNA sequence name:ETXS511
  modified_base 1: mod_base = OTHER; note = 2'O-methyl-uridine
  modified_base 2: mod_base = OTHER; note = 2'O-methyl-guanosine
  modified_base 3: mod_base = OTHER; note = 2'O-methyl-adenosine
  modified_base 4: mod_base = OTHER; note = 2'O-methyl-adenosine
  modified_base 5: mod_base = OTHER; note = 2'O-methyl-uridine
  modified_base 6: mod_base = OTHER; note = 2'Fluoro-adenosine
  modified_base 7: mod_base = OTHER; note = 2'Fluoro-adenosine
  modified_base 8: mod_base = OTHER; note = 2'O-methyl-adenosine
  modified_base 9: mod_base = OTHER; note = 2' Fluoro-uridine
  modified_base 10: mod_base = OTHER; note = 2' Fluoro-uridine
  modified_base 11: mod_base = OTHER; note = 2' Fluoro-cytidine
  modified_base 12: mod_base = OTHER; note = 2' Fluoro-cytidine
  modified_base 13: mod_base = OTHER; note = 2'O-methyl-cytidine
  modified_base 14: mod_base = OTHER; note = 2'O-methyl-adenosine
  modified_base 15: mod_base = OTHER; note = 2'O-methyl-guanosine
  modified_base 16: mod_base = OTHER; note = 2'O-methyl-uridine
  modified_base 17: mod_base = OTHER; note = 2'O-methyl-guanosine
  modified_base 18: mod_base = OTHER; note = 2'O-methyl-guanosine
  modified_base 19: mod_base = OTHER; note = 2'O-methyl-adenosine
  modified_base 20: mod_base = OTHER; note = 2'O-methyl-adenosine
  modified_base 21: mod_base = OTHER; note = 2'O-methyl-adenosine
  modified_base 1..2: mod_base = OTHER; note = phosphorothioate linkage
  modified_base 2..3: mod_base = OTHER; note = phosphorothioate linkage
  modified_base 19..20: mod_base = OTHER; note = phosphorothioate linkage
  modified_base 20..21: mod_base = OTHER; note = phosphorothioate linkage
  source 1..21: mol_type = other RNA
tgaataaattcccagtggaaa

SEQ ID NO: 703 - RNA, 21 nt, synthetic construct
  misc_feature 1..21: note = siRNA sequence name:ETXS513
  modified_base 1: mod_base = OTHER; note = 2'O-methyl-cytidine
  modified_base 2: mod_base = OTHER; note = 2'O-methyl-uridine
  modified_base 3: mod_base = OTHER; note = 2'O-methyl-guanosine
  modified_base 4: mod_base = OTHER; note = 2'O-methyl-cytidine
  modified_base 5: mod_base = OTHER; note = 2'O-methyl-adenosine
  modified_base 6: mod_base = OTHER; note = 2' Fluoro-uridine
  modified_base 7: mod_base = OTHER; note = 2' Fluoro-cytidine
  modified_base 8: mod_base = OTHER; note = 2'O-methyl-uridine
  modified_base 9: mod_base = OTHER; note = 2'Fluoro-adenosine
  modified_base 10: mod_base = OTHER; note = 2' Fluoro-cytidine
  modified_base 11: mod_base = OTHER; note = 2' Fluoro-uridine
  modified_base 12: mod_base = OTHER; note = 2' Fluoro-uridine
  modified_base 13: mod_base = OTHER; note = 2'O-methyl-cytidine
  modified_base 14: mod_base = OTHER; note = 2'O-methyl-adenosine
  modified_base 15: mod_base = OTHER; note = 2'O-methyl-adenosine
  modified_base 16: mod_base = OTHER; note = 2'O-methyl-adenosine
  modified_base 17: mod_base = OTHER; note = 2'O-methyl-guanosine
  modified_base 18: mod_base = OTHER; note = 2'O-methyl-guanosine
  modified_base 19: mod_base = OTHER; note = 2'O-methyl-adenosine
  modified_base 20: mod_base = OTHER; note = 2'O-methyl-uridine
  modified_base 21: mod_base = OTHER; note = 2'O-methyl-cytidine
  modified_base 1..2: mod_base = OTHER; note = phosphorothioate linkage
  modified_base 2..3: mod_base = OTHER; note = phosphorothioate linkage
  modified_base 19..20: mod_base = OTHER; note = phosphorothioate linkage
  modified_base 20..21: mod_base = OTHER; note = phosphorothioate linkage
  source 1..21: mol_type = other RNA
ctgcatctacttcaaaggatc

SEQ ID NO: 704 - RNA, 21 nt, synthetic construct
  misc_feature 1..21: note = siRNA sequence name:ETXS515
  modified_base 1: mod_base = OTHER; note = 2'O-methyl-adenosine
  modified_base 2: mod_base = OTHER; note = 2'O-methyl-cytidine
  modified_base 3: mod_base = OTHER; note = 2'O-methyl-uridine
  modified_base 4: mod_base = OTHER; note = 2'O-methyl-guanosine
  modified_base 5: mod_base = OTHER; note = 2'O-methyl-cytidine
  modified_base 6: mod_base = OTHER; note = 2'Fluoro-adenosine
  modified_base 7: mod_base = OTHER; note = 2' Fluoro-uridine
  modified_base 8: mod_base = OTHER; note = 2'O-methyl-cytidine
  modified_base 9: mod_base = OTHER; note = 2' Fluoro-uridine
  modified_base 10: mod_base = OTHER; note = 2'Fluoro-adenosine
  modified_base 11: mod_base = OTHER; note = 2' Fluoro-cytidine
  modified_base 12: mod_base = OTHER; note = 2' Fluoro-uridine
  modified_base 13: mod_base = OTHER; note = 2'O-methyl-uridine
  modified_base 14: mod_base = OTHER; note = 2'O-methyl-cytidine
  modified_base 15: mod_base = OTHER; note = 2'O-methyl-adenosine
  modified_base 16: mod_base = OTHER; note = 2'O-methyl-adenosine
  modified_base 17: mod_base = OTHER; note = 2'O-methyl-adenosine
  modified_base 18: mod_base = OTHER; note = 2'O-methyl-guanosine
  modified_base 19: mod_base = OTHER; note = 2'O-methyl-guanosine
  modified_base 20: mod_base = OTHER; note = 2'O-methyl-adenosine
  modified_base 21: mod_base = OTHER; note = 2'O-methyl-uridine
  modified_base 1..2: mod_base = OTHER; note = phosphorothioate linkage
  modified_base 2..3: mod_base = OTHER; note = phosphorothioate linkage
  modified_base 19..20: mod_base = OTHER; note = phosphorothioate linkage
  modified_base 20..21: mod_base = OTHER; note = phosphorothioate linkage
  source 1..21: mol_type = other RNA
actgcatctacttcaaaggat

SEQ ID NO: 705 - RNA, 21 nt, synthetic construct
  misc_feature 1..21: note = siRNA sequence name:ETXS517
  modified_base 1: mod_base = OTHER; note = 2'O-methyl-guanosine
  modified_base 2: mod_base = OTHER; note = 2'O-methyl-guanosine
  modified_base 3: mod_base = OTHER; note = 2'O-methyl-guanosine
  modified_base 4: mod_base = OTHER; note = 2'O-methyl-adenosine
  modified_base 5: mod_base = OTHER; note = 2'O-methyl-guanosine
  modified_base 6: mod_base = OTHER; note = 2'Fluoro-adenosine
  modified_base 7: mod_base = OTHER; note = 2' Fluoro-guanosine
  modified_base 8: mod_base = OTHER; note = 2'O-methyl-adenosine
  modified_base 9: mod_base = OTHER; note = 2' Fluoro-cytidine
  modified_base 10: mod_base = OTHER; note = 2' Fluoro-cytidine
  modified_base 11: mod_base = OTHER; note = 2' Fluoro-cytidine
  modified_base 12: mod_base = OTHER; note = 2'Fluoro-adenosine
  modified_base 13: mod_base = OTHER; note = 2'O-methyl-uridine
  modified_base 14: mod_base = OTHER; note = 2'O-methyl-guanosine
  modified_base 15: mod_base = OTHER; note = 2'O-methyl-adenosine
  modified_base 16: mod_base = OTHER; note = 2'O-methyl-adenosine
  modified_base 17: mod_base = OTHER; note = 2'O-methyl-cytidine
  modified_base 18: mod_base = OTHER; note = 2'O-methyl-adenosine
  modified_base 19: mod_base = OTHER; note = 2'O-methyl-adenosine
  modified_base 20: mod_base = OTHER; note = 2'O-methyl-guanosine
  modified_base 21: mod_base = OTHER; note = 2'O-methyl-uridine
  modified_base 1..2: mod_base = OTHER; note = phosphorothioate linkage
  modified_base 2..3: mod_base = OTHER; note = phosphorothioate linkage
  modified_base 19..20: mod_base = OTHER; note = phosphorothioate linkage
  modified_base 20..21: mod_base = OTHER; note = phosphorothioate linkage
  source 1..21: mol_type = other RNA
gggagagacccatgaacaagt

SEQ ID NO: 706 - RNA, 21 nt, synthetic construct
  misc_feature 1..21: note = siRNA sequence name:ETXS519
  modified_base 1: mod_base = OTHER; note = 2'O-methyl-guanosine
  modified_base 2: mod_base = OTHER; note = 2'O-methyl-guanosine
  modified_base 3: mod_base = OTHER; note = 2'O-methyl-uridine
  modified_base 4: mod_base = OTHER; note = 2'O-methyl-guanosine
  modified_base 5: mod_base = OTHER; note = 2'O-methyl-adenosine
  modified_base 6: mod_base = OTHER; note = 2'Fluoro-adenosine
  modified_base 7: mod_base = OTHER; note = 2' Fluoro-uridine
  modified_base 8: mod_base = OTHER; note = 2'O-methyl-adenosine
  modified_base 9: mod_base = OTHER; note = 2'Fluoro-adenosine
  modified_base 10: mod_base = OTHER; note = 2'Fluoro-adenosine
  modified_base 11: mod_base = OTHER; note = 2' Fluoro-uridine
  modified_base 12: mod_base = OTHER; note = 2' Fluoro-uridine
  modified_base 13: mod_base = OTHER; note = 2'O-methyl-cytidine
  modified_base 14: mod_base = OTHER; note = 2'O-methyl-cytidine
  modified_base 15: mod_base = OTHER; note = 2'O-methyl-cytidine
  modified_base 16: mod_base = OTHER; note = 2'O-methyl-adenosine
  modified_base 17: mod_base = OTHER; note = 2'O-methyl-guanosine
  modified_base 18: mod_base = OTHER; note = 2'O-methyl-uridine
  modified_base 19: mod_base = OTHER; note = 2'O-methyl-guanosine
  modified_base 20: mod_base = OTHER; note = 2'O-methyl-guanosine
  modified_base 21: mod_base = OTHER; note = 2'O-methyl-adenosine
  modified_base 1..2: mod_base = OTHER; note = phosphorothioate linkage
  modified_base 2..3: mod_base = OTHER; note = phosphorothioate linkage
  modified_base 19..20: mod_base = OTHER; note = phosphorothioate linkage
  modified_base 20..21: mod_base = OTHER; note = phosphorothioate linkage
  source 1..21: mol_type = other RNA
ggtgaataaattcccagtgga

SEQ ID NO: 707 - RNA, 21 nt, synthetic construct
  misc_feature 1..21: note = siRNA sequence name:ETXS521
  modified_base 1: mod_base = OTHER; note = 2'O-methyl-uridine
  modified_base 2: mod_base = OTHER; note = 2'O-methyl-cytidine
  modified_base 3: mod_base = OTHER; note = 2'O-methyl-adenosine
  modified_base 4: mod_base = OTHER; note = 2'O-methyl-guanosine
  modified_base 5: mod_base = OTHER; note = 2'O-methyl-guanosine
  modified_base 6: mod_base = OTHER; note = 2'Fluoro-adenosine
  modified_base 7: mod_base = OTHER; note = 2' Fluoro-guanosine
  modified_base 8: mod_base = OTHER; note = 2'O-methyl-guanosine
  modified_base 9: mod_base = OTHER; note = 2'Fluoro-adenosine
  modified_base 10: mod_base = OTHER; note = 2'Fluoro-adenosine
  modified_base 11: mod_base = OTHER; note = 2' Fluoro-uridine
  modified_base 12: mod_base = OTHER; note = 2' Fluoro-uridine
  modified_base 13: mod_base = OTHER; note = 2'O-methyl-uridine
  modified_base 14: mod_base = OTHER; note = 2'O-methyl-uridine
  modified_base 15: mod_base = OTHER; note = 2'O-methyl-guanosine
  modified_base 16: mod_base = OTHER; note = 2'O-methyl-guanosine
  modified_base 17: mod_base = OTHER; note = 2'O-methyl-guanosine
  modified_base 18: mod_base = OTHER; note = 2'O-methyl-uridine
  modified_base 19: mod_base = OTHER; note = 2'O-methyl-adenosine
  modified_base 20: mod_base = OTHER; note = 2'O-methyl-cytidine
  modified_base 21: mod_base = OTHER; note = 2'O-methyl-adenosine
  modified_base 1..2: mod_base = OTHER; note = phosphorothioate linkage
  modified_base 2..3: mod_base = OTHER; note = phosphorothioate linkage
  modified_base 19..20: mod_base = OTHER; note = phosphorothioate linkage
  modified_base 20..21: mod_base = OTHER; note = phosphorothioate linkage
  source 1..21: mol_type = other RNA
tcaggaggaattttgggtaca

SEQ ID NO: 708 - RNA, 21 nt, synthetic construct
  misc_feature 1..21: note = siRNA sequence name:ETXS523
  modified_base 1: mod_base = OTHER; note = 2'O-methyl-guanosine
  modified_base 2: mod_base = OTHER; note = 2'O-methyl-cytidine
  modified_base 3: mod_base = OTHER; note = 2'O-methyl-uridine
  modified_base 4: mod_base = OTHER; note = 2'O-methyl-guanosine
  modified_base 5: mod_base = OTHER; note = 2'O-methyl-cytidine
  modified_base 6: mod_base = OTHER; note = 2' Fluoro-cytidine
  modified_base 7: mod_base = OTHER; note = 2' Fluoro-uridine
  modified_base 8: mod_base = OTHER; note = 2'O-methyl-guanosine
  modified_base 9: mod_base = OTHER; note = 2' Fluoro-cytidine
  modified_base 10: mod_base = OTHER; note = 2' Fluoro-uridine
  modified_base 11: mod_base = OTHER; note = 2' Fluoro-cytidine
  modified_base 12: mod_base = OTHER; note = 2' Fluoro-uridine
  modified_base 13: mod_base = OTHER; note = 2'O-methyl-uridine
  modified_base 14: mod_base = OTHER; note = 2'O-methyl-cytidine
  modified_base 15: mod_base = OTHER; note = 2'O-methyl-adenosine
  modified_base 16: mod_base = OTHER; note = 2'O-methyl-uridine
  modified_base 17: mod_base = OTHER; note = 2'O-methyl-guanosine
  modified_base 18: mod_base = OTHER; note = 2'O-methyl-guanosine
  modified_base 19: mod_base = OTHER; note = 2'O-methyl-guanosine
  modified_base 20: mod_base = OTHER; note = 2'O-methyl-adenosine
  modified_base 21: mod_base = OTHER; note = 2'O-methyl-adenosine
  modified_base 1..2: mod_base = OTHER; note = phosphorothioate linkage
  modified_base 2..3: mod_base = OTHER; note = phosphorothioate linkage
  modified_base 19..20: mod_base = OTHER; note = phosphorothioate linkage
  modified_base 20..21: mod_base = OTHER; note = phosphorothioate linkage
  source 1..21: mol_type = other RNA
gctgcctgctcttcatgggaa

SEQ ID NO: 709 - RNA, 21 nt, synthetic construct
  misc_feature 1..21: note = siRNA sequence name:ETXS525
  modified_base 1: mod_base = OTHER; note = 2'O-methyl-cytidine
  modified_base 2: mod_base = OTHER; note = 2'O-methyl-adenosine
  modified_base 3: mod_base = OTHER; note = 2'O-methyl-cytidine
  modified_base 4: mod_base = OTHER; note = 2'O-methyl-cytidine
  modified_base 5: mod_base = OTHER; note = 2'O-methyl-adenosine
  modified_base 6: mod_base = OTHER; note = 2'Fluoro-adenosine
  modified_base 7: mod_base = OTHER; note = 2' Fluoro-guanosine
  modified_base 8: mod_base = OTHER; note = 2'O-methyl-guanosine
  modified_base 9: mod_base = OTHER; note = 2' Fluoro-guanosine
  modified_base 10: mod_base = OTHER; note = 2' Fluoro-cytidine
  modified_base 11: mod_base = OTHER; note = 2' Fluoro-cytidine
  modified_base 12: mod_base = OTHER; note = 2' Fluoro-uridine
  modified_base 13: mod_base = OTHER; note = 2'O-methyl-cytidine
  modified_base 14: mod_base = OTHER; note = 2'O-methyl-adenosine
  modified_base 15: mod_base = OTHER; note = 2'O-methyl-uridine
  modified_base 16: mod_base = OTHER; note = 2'O-methyl-adenosine
  modified_base 17: mod_base = OTHER; note = 2'O-methyl-adenosine
  modified_base 18: mod_base = OTHER; note = 2'O-methyl-adenosine
  modified_base 19: mod_base = OTHER; note = 2'O-methyl-adenosine
  modified_base 20: mod_base = OTHER; note = 2'O-methyl-guanosine
  modified_base 21: mod_base = OTHER; note = 2'O-methyl-adenosine
  modified_base 1..2: mod_base = OTHER; note = phosphorothioate linkage
  modified_base 2..3: mod_base = OTHER; note = phosphorothioate linkage
  modified_base 19..20: mod_base = OTHER; note = phosphorothioate linkage
  modified_base 20..21: mod_base = OTHER; note = phosphorothioate linkage
  source 1..21: mol_type = other RNA
caccaagggcctcataaaaga

SEQ ID NO: 710 - RNA, 21 nt, synthetic construct
  misc_feature 1..21: note = siRNA sequence name:ETXS527
  modified_base 1: mod_base = OTHER; note = 2'O-methyl-cytidine
  modified_base 2: mod_base = OTHER; note = 2'O-methyl-cytidine
  modified_base 3: mod_base = OTHER; note = 2'O-methyl-uridine
  modified_base 4: mod_base = OTHER; note = 2'O-methyl-uridine
  modified_base 5: mod_base = OTHER; note = 2'O-methyl-uridine
  modified_base 6: mod_base = OTHER; note = 2'Fluoro-adenosine
  modified_base 7: mod_base = OTHER; note = 2' Fluoro-uridine
  modified_base 8: mod_base = OTHER; note = 2'O-methyl-adenosine
  modified_base 9: mod_base = OTHER; note = 2' Fluoro-uridine
  modified_base 10: mod_base = OTHER; note = 2' Fluoro-cytidine
  modified_base 11: mod_base = OTHER; note = 2' Fluoro-cytidine
  modified_base 12: mod_base = OTHER; note = 2'Fluoro-adenosine
  modified_base 13: mod_base = OTHER; note = 2'O-methyl-guanosine
  modified_base 14: mod_base = OTHER; note = 2'O-methyl-adenosine
  modified_base 15: mod_base = OTHER; note = 2'O-methyl-adenosine
  modified_base 16: mod_base = OTHER; note = 2'O-methyl-guanosine
  modified_base 17: mod_base = OTHER; note = 2'O-methyl-cytidine
  modified_base 18: mod_base = OTHER; note = 2'O-methyl-adenosine
  modified_base 19: mod_base = OTHER; note = 2'O-methyl-guanosine
  modified_base 20: mod_base = OTHER; note = 2'O-methyl-uridine
  modified_base 21: mod_base = OTHER; note = 2'O-methyl-uridine
  modified_base 1..2: mod_base = OTHER; note = phosphorothioate linkage
  modified_base 2..3: mod_base = OTHER; note = phosphorothioate linkage
  modified_base 19..20: mod_base = OTHER; note = phosphorothioate linkage
  modified_base 20..21: mod_base = OTHER; note = phosphorothioate linkage
  source 1..21: mol_type = other RNA
cctttatatccagaagcagtt

SEQ ID NO: 711 - RNA, 21 nt, synthetic construct
  misc_feature 1..21: note = siRNA sequence name:ETXS529
  modified_base 1: mod_base = OTHER; note = 2'O-methyl-cytidine
  modified_base 2: mod_base = OTHER; note = 2'O-methyl-adenosine
  modified_base 3: mod_base = OTHER; note = 2'O-methyl-adenosine
  modified_base 4: mod_base = OTHER; note = 2'O-methyl-cytidine
  modified_base 5: mod_base = OTHER; note = 2'O-methyl-uridine
  modified_base 6: mod_base = OTHER; note = 2' Fluoro-guanosine
  modified_base 7: mod_base = OTHER; note = 2' Fluoro-cytidine
  modified_base 8: mod_base = OTHER; note = 2'O-methyl-adenosine
  modified_base 9: mod_base = OTHER; note = 2' Fluoro-uridine
  modified_base 10: mod_base = OTHER; note = 2' Fluoro-cytidine
  modified_base 11: mod_base = OTHER; note = 2' Fluoro-uridine
  modified_base 12: mod_base = OTHER; note = 2'Fluoro-adenosine
  modified_base 13: mod_base = OTHER; note = 2'O-methyl-cytidine
  modified_base 14: mod_base = OTHER; note = 2'O-methyl-uridine
  modified_base 15: mod_base = OTHER; note = 2'O-methyl-uridine
  modified_base 16: mod_base = OTHER; note = 2'O-methyl-cytidine
  modified_base 17: mod_base = OTHER; note = 2'O-methyl-adenosine
  modified_base 18: mod_base = OTHER; note = 2'O-methyl-adenosine
  modified_base 19: mod_base = OTHER; note = 2'O-methyl-adenosine
  modified_base 20: mod_base = OTHER; note = 2'O-methyl-guanosine
  modified_base 21: mod_base = OTHER; note = 2'O-methyl-guanosine
  modified_base 1..2: mod_base = OTHER; note = phosphorothioate linkage
  modified_base 2..3: mod_base = OTHER; note = phosphorothioate linkage
  modified_base 19..20: mod_base = OTHER; note = phosphorothioate linkage
  modified_base 20..21: mod_base = OTHER; note = phosphorothioate linkage
  source 1..21: mol_type = other RNA
caactgcatctacttcaaagg

SEQ ID NO: 712 - RNA, 21 nt, synthetic construct
  misc_feature 1..21: note = siRNA sequence name:ETXS531
  modified_base 1: mod_base = OTHER; note = 2'O-methyl-guanosine
  modified_base 2: mod_base = OTHER; note = 2'O-methyl-adenosine
  modified_base 3: mod_base = OTHER; note = 2'O-methyl-guanosine
  modified_base 4: mod_base = OTHER; note = 2'O-methyl-cytidine
  modified_base 5: mod_base = OTHER; note = 2'O-methyl-cytidine
  modified_base 6: mod_base = OTHER; note = 2' Fluoro-guanosine
  modified_base 7: mod_base = OTHER; note = 2' Fluoro-guanosine
  modified_base 8: mod_base = OTHER; note = 2'O-methyl-adenosine
  modified_base 9: mod_base = OTHER; note = 2' Fluoro-uridine
  modified_base 10: mod_base = OTHER; note = 2' Fluoro-cytidine
  modified_base 11: mod_base = OTHER; note = 2' Fluoro-cytidine
  modified_base 12: mod_base = OTHER; note = 2'Fluoro-adenosine
  modified_base 13: mod_base = OTHER; note = 2'O-methyl-guanosine
  modified_base 14: mod_base = OTHER; note = 2'O-methyl-cytidine
  modified_base 15: mod_base = OTHER; note = 2'O-methyl-guanosine
  modified_base 16: mod_base = OTHER; note = 2'O-methyl-uridine
  modified_base 17: mod_base = OTHER; note = 2'O-methyl-cytidine
  modified_base 18: mod_base = OTHER; note = 2'O-methyl-uridine
  modified_base 19: mod_base = OTHER; note = 2'O-methyl-uridine
  modified_base 20: mod_base = OTHER; note = 2'O-methyl-adenosine
  modified_base 21: mod_base = OTHER; note = 2'O-methyl-adenosine
  modified_base 1..2: mod_base = OTHER; note = phosphorothioate linkage
  modified_base 2..3: mod_base = OTHER; note = phosphorothioate linkage
  modified_base 19..20: mod_base = OTHER; note = phosphorothioate linkage
  modified_base 20..21: mod_base = OTHER; note = phosphorothioate linkage
  source 1..21: mol_type = other RNA
gagccggatccagcgtcttaa

SEQ ID NO: 713 - RNA, 21 nt, synthetic construct
  misc_feature 1..21: note = siRNA sequence name:ETXS533
  modified_base 1: mod_base = OTHER; note = 2'O-methyl-adenosine
  modified_base 2: mod_base = OTHER; note = 2'O-methyl-uridine
  modified_base 3: mod_base = OTHER; note = 2'O-methyl-cytidine
  modified_base 4: mod_base = OTHER; note = 2'O-methyl-cytidine
  modified_base 5: mod_base = OTHER; note = 2'O-methyl-adenosine
  modified_base 6: mod_base = OTHER; note = 2' Fluoro-guanosine
  modified_base 7: mod_base = OTHER; note = 2' Fluoro-cytidine
  modified_base 8: mod_base = OTHER; note = 2'O-methyl-guanosine
  modified_base 9: mod_base = OTHER; note = 2' Fluoro-uridine
  modified_base 10: mod_base = OTHER; note = 2' Fluoro-cytidine
  modified_base 11: mod_base = OTHER; note = 2' Fluoro-uridine
  modified_base 12: mod_base = OTHER; note = 2' Fluoro-uridine
  modified_base 13: mod_base = OTHER; note = 2'O-methyl-adenosine
  modified_base 14: mod_base = OTHER; note = 2'O-methyl-adenosine
  modified_base 15: mod_base = OTHER; note = 2'O-methyl-cytidine
  modified_base 16: mod_base = OTHER; note = 2'O-methyl-adenosine
  modified_base 17: mod_base = OTHER; note = 2'O-methyl-uridine
  modified_base 18: mod_base = OTHER; note = 2'O-methyl-cytidine
  modified_base 19: mod_base = OTHER; note = 2'O-methyl-cytidine
  modified_base 20: mod_base = OTHER; note = 2'O-methyl-uridine
  modified_base 21: mod_base = OTHER; note = 2'O-methyl-cytidine
  modified_base 1..2: mod_base = OTHER; note = phosphorothioate linkage
  modified_base 2..3: mod_base = OTHER; note = phosphorothioate linkage
  modified_base 19..20: mod_base = OTHER; note = phosphorothioate linkage
  modified_base 20..21: mod_base = OTHER; note = phosphorothioate linkage
  source 1..21: mol_type = other RNA
atccagcgtcttaacatcctc

SEQ ID NO: 714 - RNA, 21 nt, synthetic construct
  misc_feature 1..21: note = siRNA sequence name:ETXS535
  modified_base 1: mod_base = OTHER; note = 2'O-methyl-cytidine
  modified_base 2: mod_base = OTHER; note = 2'O-methyl-adenosine
  modified_base 3: mod_base = OTHER; note = 2'O-methyl-adenosine
  modified_base 4: mod_base = OTHER; note = 2'O-methyl-adenosine
  modified_base 5: mod_base = OTHER; note = 2'O-methyl-adenosine
  modified_base 6: mod_base = OTHER; note = 2'Fluoro-adenosine
  modified_base 7: mod_base = OTHER; note = 2'Fluoro-adenosine
  modified_base 8: mod_base = OTHER; note = 2'O-methyl-guanosine
  modified_base 9: mod_base = OTHER; note = 2' Fluoro-cytidine
  modified_base 10: mod_base = OTHER; note = 2'Fluoro-adenosine
  modified_base 11: mod_base = OTHER; note = 2' Fluoro-uridine
  modified_base 12: mod_base = OTHER; note = 2' Fluoro-guanosine
  modified_base 13: mod_base = OTHER; note = 2'O-methyl-adenosine
  modified_base 14: mod_base = OTHER; note = 2'O-methyl-cytidine
  modified_base 15: mod_base = OTHER; note = 2'O-methyl-adenosine
  modified_base 16: mod_base = OTHER; note = 2'O-methyl-adenosine
  modified_base 17: mod_base = OTHER; note = 2'O-methyl-adenosine
  modified_base 18: mod_base = OTHER; note = 2'O-methyl-cytidine
  modified_base 19: mod_base = OTHER; note = 2'O-methyl-adenosine
  modified_base 20: mod_base = OTHER; note = 2'O-methyl-guanosine
  modified_base 21: mod_base = OTHER; note = 2'O-methyl-adenosine
  modified_base 1..2: mod_base = OTHER; note = phosphorothioate linkage
  modified_base 2..3: mod_base = OTHER; note = phosphorothioate linkage
  modified_base 19..20: mod_base = OTHER; note = phosphorothioate linkage
  modified_base 20..21: mod_base = OTHER; note = phosphorothioate linkage
  source 1..21: mol_type = other RNA
caaaaaagcatgacaaacaga

SEQ ID NO: 715 - RNA, 21 nt, synthetic construct
  misc_feature 1..21: note = siRNA sequence name:ETXS537
  modified_base 1: mod_base = OTHER; note = 2'O-methyl-cytidine
  modified_base 2: mod_base = OTHER; note = 2'O-methyl-adenosine
  modified_base 3: mod_base = OTHER; note = 2'O-methyl-guanosine
  modified_base 4: mod_base = OTHER; note = 2'O-methyl-guanosine
  modified_base 5: mod_base = OTHER; note = 2'O-methyl-adenosine
  modified_base 6: mod_base = OTHER; note = 2' Fluoro-guanosine
  modified_base 7: mod_base = OTHER; note = 2' Fluoro-guanosine
  modified_base 8: mod_base = OTHER; note = 2'O-methyl-adenosine
  modified_base 9: mod_base = OTHER; note = 2'Fluoro-adenosine
  modified_base 10: mod_base = OTHER; note = 2' Fluoro-uridine
  modified_base 11: mod_base = OTHER; note = 2' Fluoro-uridine
  modified_base 12: mod_base = OTHER; note = 2' Fluoro-uridine
  modified_base 13: mod_base = OTHER; note = 2'O-methyl-uridine
  modified_base 14: mod_base = OTHER; note = 2'O-methyl-guanosine
  modified_base 15: mod_base = OTHER; note = 2'O-methyl-guanosine
  modified_base 16: mod_base = OTHER; note = 2'O-methyl-guanosine
  modified_base 17: mod_base = OTHER; note = 2'O-methyl-uridine
  modified_base 18: mod_base = OTHER; note = 2'O-methyl-adenosine
  modified_base 19: mod_base = OTHER; note = 2'O-methyl-cytidine
  modified_base 20: mod_base = OTHER; note = 2'O-methyl-adenosine
  modified_base 21: mod_base = OTHER; note = 2'O-methyl-cytidine
  modified_base 1..2: mod_base = OTHER; note = phosphorothioate linkage
  modified_base 2..3: mod_base = OTHER; note = phosphorothioate linkage
  modified_base 19..20: mod_base = OTHER; note = phosphorothioate linkage
  modified_base 20..21: mod_base = OTHER; note = phosphorothioate linkage
  source 1..21: mol_type = other RNA
caggaggaattttgggtacac

SEQ ID NO: 716 - RNA, 21 nt, synthetic construct
  misc_feature 1..21: note = siRNA sequence name:ETXS539
  modified_base 1: mod_base = OTHER; note = 2'O-methyl-cytidine
  modified_base 2: mod_base = OTHER; note = 2'O-methyl-adenosine
  modified_base 3: mod_base = OTHER; note = 2'O-methyl-adenosine
  modified_base 4: mod_base = OTHER; note = 2'O-methyl-cytidine
  modified_base 5: mod_base = OTHER; note = 2'O-methyl-cytidine
  modified_base 6: mod_base = OTHER; note = 2'Fluoro-adenosine
  modified_base 7: mod_base = OTHER; note = 2' Fluoro-cytidine
  modified_base 8: mod_base = OTHER; note = 2'O-methyl-adenosine
  modified_base 9: mod_base = OTHER; note = 2'Fluoro-adenosine
  modified_base 10: mod_base = OTHER; note = 2' Fluoro-cytidine
  modified_base 11: mod_base = OTHER; note = 2' Fluoro-uridine
  modified_base 12: mod_base = OTHER; note = 2' Fluoro-uridine
  modified_base 13: mod_base = OTHER; note = 2'O-methyl-cytidine
  modified_base 14: mod_base = OTHER; note = 2'O-methyl-cytidine
  modified_base 15: mod_base = OTHER; note = 2'O-methyl-guanosine
  modified_base 16: mod_base = OTHER; note = 2'O-methyl-guanosine
  modified_base 17: mod_base = OTHER; note = 2'O-methyl-cytidine
  modified_base 18: mod_base = OTHER; note = 2'O-methyl-uridine
  modified_base 19: mod_base = OTHER; note = 2'O-methyl-guanosine
  modified_base 20: mod_base = OTHER; note = 2'O-methyl-adenosine
  modified_base 21: mod_base = OTHER; note = 2'O-methyl-adenosine
  modified_base 1..2: mod_base = OTHER; note = phosphorothioate linkage
  modified_base 2..3: mod_base = OTHER; note = phosphorothioate linkage
  modified_base 19..20: mod_base = OTHER; note = phosphorothioate linkage
  modified_base 20..21: mod_base = OTHER; note = phosphorothioate linkage
  source 1..21: mol_type = other RNA
caaccacaacttccggctgaa

SEQ ID NO: 717 - RNA, 21 nt, synthetic construct
  misc_feature 1..21: note = siRNA sequence name:ETXS541
  modified_base 1: mod_base = OTHER; note = 2'O-methyl-guanosine
  modified_base 2: mod_base = OTHER; note = 2'O-methyl-guanosine
  modified_base 3: mod_base = OTHER; note = 2'O-methyl-cytidine
  modified_base 4: mod_base = OTHER; note = 2'O-methyl-adenosine
  modified_base 5: mod_base = OTHER; note = 2'O-methyl-adenosine
  modified_base 6: mod_base = OTHER; note = 2'Fluoro-adenosine
  modified_base 7: mod_base = OTHER; note = 2'Fluoro-adenosine
  modified_base 8: mod_base = OTHER; note = 2'O-methyl-adenosine
  modified_base 9: mod_base = OTHER; note = 2'Fluoro-adenosine
  modified_base 10: mod_base = OTHER; note = 2' Fluoro-guanosine
  modified_base 11: mod_base = OTHER; note = 2' Fluoro-cytidine
  modified_base 12: mod_base = OTHER; note = 2'Fluoro-adenosine
  modified_base 13: mod_base = OTHER; note = 2'O-methyl-uridine
  modified_base 14: mod_base = OTHER; note = 2'O-methyl-guanosine
  modified_base 15: mod_base = OTHER; note = 2'O-methyl-adenosine
  modified_base 16: mod_base = OTHER; note = 2'O-methyl-cytidine
  modified_base 17: mod_base = OTHER; note = 2'O-methyl-adenosine
  modified_base 18: mod_base = OTHER; note = 2'O-methyl-adenosine
  modified_base 19: mod_base = OTHER; note = 2'O-methyl-adenosine
  modified_base 20: mod_base = OTHER; note = 2'O-methyl-cytidine
  modified_base 21: mod_base = OTHER; note = 2'O-methyl-adenosine
  modified_base 1..2: mod_base = OTHER; note = phosphorothioate linkage
  modified_base 2..3: mod_base = OTHER; note = phosphorothioate linkage
  modified_base 19..20: mod_base = OTHER; note = phosphorothioate linkage
  modified_base 20..21: mod_base = OTHER; note = phosphorothioate linkage
  source 1..21: mol_type = other RNA
ggcaaaaaagcatgacaaaca

SEQ ID NO: 718 - RNA, 21 nt, synthetic construct
  misc_feature 1..21: note = siRNA sequence name:ETXS543
  modified_base 1: mod_base = OTHER; note = 2'O-methyl-guanosine
  modified_base 2: mod_base = OTHER; note = 2'O-methyl-adenosine
  modified_base 3: mod_base = OTHER; note = 2'O-methyl-adenosine
  modified_base 4: mod_base = OTHER; note = 2'O-methyl-uridine
  modified_base 5: mod_base = OTHER; note = 2'O-methyl-adenosine
  modified_base 6: mod_base = OTHER; note = 2'Fluoro-adenosine
  modified_base 7: mod_base = OTHER; note = 2'Fluoro-adenosine
  modified_base 8: mod_base = OTHER; note = 2'O-methyl-uridine
  modified_base 9: mod_base = OTHER; note = 2' Fluoro-uridine
  modified_base 10: mod_base = OTHER; note = 2' Fluoro-cytidine
  modified_base 11: mod_base = OTHER; note = 2' Fluoro-cytidine
  modified_base 12: mod_base = OTHER; note = 2' Fluoro-cytidine
  modified_base 13: mod_base = OTHER; note = 2'O-methyl-adenosine
  modified_base 14: mod_base = OTHER; note = 2'O-methyl-guanosine
  modified_base 15: mod_base = OTHER; note = 2'O-methyl-uridine
  modified_base 16: mod_base = OTHER; note = 2'O-methyl-guanosine
  modified_base 17: mod_base = OTHER; note = 2'O-methyl-guanosine
  modified_base 18: mod_base = OTHER; note = 2'O-methyl-adenosine
  modified_base 19: mod_base = OTHER; note = 2'O-methyl-adenosine
  modified_base 20: mod_base = OTHER; note = 2'O-methyl-adenosine
  modified_base 21: mod_base = OTHER; note = 2'O-methyl-uridine
  modified_base 1..2: mod_base = OTHER; note = phosphorothioate linkage
  modified_base 2..3: mod_base = OTHER; note = phosphorothioate linkage
  modified_base 19..20: mod_base = OTHER; note = phosphorothioate linkage
  modified_base 20..21: mod_base = OTHER; note = phosphorothioate linkage
  source 1..21: mol_type = other RNA
gaataaattcccagtggaaat

SEQ ID NO: 719 - RNA, 21 nt, synthetic construct
  misc_feature 1..21: note = siRNA sequence name:ETXS545
  modified_base 1: mod_base = OTHER; note = 2'O-methyl-guanosine
  modified_base 2: mod_base = OTHER; note = 2'O-methyl-guanosine
  modified_base 3: mod_base = OTHER; note = 2'O-methyl-guanosine
  modified_base 4: mod_base = OTHER; note = 2'O-methyl-cytidine
  modified_base 5: mod_base = OTHER; note = 2'O-methyl-adenosine
  modified_base 6: mod_base = OTHER; note = 2' Fluoro-uridine
  modified_base 7: mod_base = OTHER; note = 2' Fluoro-cytidine
  modified_base 8: mod_base = OTHER; note = 2'O-methyl-adenosine
  modified_base 9: mod_base = OTHER; note = 2' Fluoro-guanosine
  modified_base 10: mod_base = OTHER; note = 2' Fluoro-cytidine
  modified_base 11: mod_base = OTHER; note = 2'Fluoro-adenosine
  modified_base 12: mod_base = OTHER; note = 2' Fluoro-uridine
  modified_base 13: mod_base = OTHER; note = 2'O-methyl-guanosine
  modified_base 14: mod_base = OTHER; note = 2'O-methyl-cytidine
  modified_base 15: mod_base = OTHER; note = 2'O-methyl-uridine
  modified_base 16: mod_base = OTHER; note = 2'O-methyl-adenosine
  modified_base 17: mod_base = OTHER; note = 2'O-methyl-adenosine
  modified_base 18: mod_base = OTHER; note = 2'O-methyl-uridine
  modified_base 19: mod_base = OTHER; note = 2'O-methyl-uridine
  modified_base 20: mod_base = OTHER; note = 2'O-methyl-guanosine
  modified_base 21: mod_base = OTHER; note = 2'O-methyl-uridine
  modified_base 1..2: mod_base = OTHER; note = phosphorothioate linkage
  modified_base 2..3: mod_base = OTHER; note = phosphorothioate linkage
  modified_base 19..20: mod_base = OTHER; note = phosphorothioate linkage
  modified_base 20..21: mod_base = OTHER; note = phosphorothioate linkage
  source 1..21: mol_type = other RNA
gggcatcagcatgctaattgt

SEQ ID NO: 720 - RNA, 21 nt, synthetic construct
  misc_feature 1..21: note = siRNA sequence name:ETXS547
  modified_base 1: mod_base = OTHER; note = 2'O-methyl-adenosine
  modified_base 2: mod_base = OTHER; note = 2'O-methyl-adenosine
  modified_base 3: mod_base = OTHER; note = 2'O-methyl-adenosine
  modified_base 4: mod_base = OTHER; note = 2'O-methyl-adenosine
  modified_base 5: mod_base = OTHER; note = 2'O-methyl-adenosine
  modified_base 6: mod_base = OTHER; note = 2' Fluoro-guanosine
  modified_base 7: mod_base = OTHER; note = 2' Fluoro-cytidine
  modified_base 8: mod_base = OTHER; note = 2'O-methyl-adenosine
  modified_base 9: mod_base = OTHER; note = 2' Fluoro-uridine
  modified_base 10: mod_base = OTHER; note = 2' Fluoro-guanosine
  modified_base 11: mod_base = OTHER; note = 2'Fluoro-adenosine
  modified_base 12: mod_base = OTHER; note = 2' Fluoro-cytidine
  modified_base 13: mod_base = OTHER; note = 2'O-methyl-adenosine
  modified_base 14: mod_base = OTHER; note = 2'O-methyl-adenosine
  modified_base 15: mod_base = OTHER; note = 2'O-methyl-adenosine
  modified_base 16: mod_base = OTHER; note = 2'O-methyl-cytidine
  modified_base 17: mod_base = OTHER; note = 2'O-methyl-adenosine
  modified_base 18: mod_base = OTHER; note = 2'O-methyl-guanosine
  modified_base 19: mod_base = OTHER; note = 2'O-methyl-adenosine
  modified_base 20: mod_base = OTHER; note = 2'O-methyl-adenosine
  modified_base 21: mod_base = OTHER; note = 2'O-methyl-cytidine
  modified_base 1..2: mod_base = OTHER; note = phosphorothioate linkage
  modified_base 2..3: mod_base = OTHER; note = phosphorothioate linkage
  modified_base 19..20: mod_base = OTHER; note = phosphorothioate linkage
  modified_base 20..21: mod_base = OTHER; note = phosphorothioate linkage
  source 1..21: mol_type = other RNA
aaaaagcatgacaaacagaac

SEQ ID NO: 721 - RNA, 21 nt, synthetic construct
  misc_feature 1..21: note = siRNA sequence name:ETXS549
  modified_base 1: mod_base = OTHER; note = 2'O-methyl-guanosine
  modified_base 2: mod_base = OTHER; note = 2'O-methyl-adenosine
  modified_base 3: mod_base = OTHER; note = 2'O-methyl-guanosine
  modified_base 4: mod_base = OTHER; note = 2'O-methyl-uridine
  modified_base 5: mod_base = OTHER; note = 2'O-methyl-adenosine
  modified_base 6: mod_base = OTHER; note = 2' Fluoro-uridine
  modified_base 7: mod_base = OTHER; note = 2' Fluoro-uridine
  modified_base 8: mod_base = OTHER; note = 2'O-methyl-adenosine
  modified_base 9: mod_base = OTHER; note = 2' Fluoro-cytidine
  modified_base 10: mod_base = OTHER; note = 2' Fluoro-uridine
  modified_base 11: mod_base = OTHER; note = 2' Fluoro-uridine
  modified_base 12: mod_base = OTHER; note = 2' Fluoro-uridine
  modified_base 13: mod_base = OTHER; note = 2'O-methyl-guanosine
  modified_base 14: mod_base = OTHER; note = 2'O-methyl-cytidine
  modified_base 15: mod_base = OTHER; note = 2'O-methyl-uridine
  modified_base 16: mod_base = OTHER; note = 2'O-methyl-guanosine
  modified_base 17: mod_base = OTHER; note = 2'O-methyl-adenosine
  modified_base 18: mod_base = OTHER; note = 2'O-methyl-guanosine
  modified_base 19: mod_base = OTHER; note = 2'O-methyl-guanosine
  modified_base 20: mod_base = OTHER; note = 2'O-methyl-cytidine
  modified_base 21: mod_base = OTHER; note = 2'O-methyl-cytidine
  modified_base 1..2: mod_base = OTHER; note = phosphorothioate linkage
  modified_base 2..3: mod_base = OTHER; note = phosphorothioate linkage
  modified_base 19..20: mod_base = OTHER; note = phosphorothioate linkage
  modified_base 20..21: mod_base = OTHER; note = phosphorothioate linkage
  source 1..21: mol_type = other RNA
gagtattactttgctgaggcc

SEQ ID NO: 722 - RNA, 21 nt, synthetic construct
  misc_feature 1..21: note = siRNA sequence name:ETXS551
  modified_base 1: mod_base = OTHER; note = 2'O-methyl-uridine
  modified_base 2: mod_base = OTHER; note = 2'O-methyl-guanosine
  modified_base 3: mod_base = OTHER; note = 2'O-methyl-adenosine
  modified_base 4: mod_base = OTHER; note = 2'O-methyl-adenosine
  modified_base 5: mod_base = OTHER; note = 2'O-methyl-uridine
  modified_base 6: mod_base = OTHER; note = 2'O-methyl-adenosine
  modified_base 7: mod_base = OTHER; note = 2'Fluoro-adenosine
  modified_base 8: mod_base = OTHER; note = 2'O-methyl-adenosine
  modified_base 9: mod_base = OTHER; note = 2' Fluoro-uridine
  modified_base 10: mod_base = OTHER; note = 2' Fluoro-uridine
  modified_base 11: mod_base = OTHER; note = 2' Fluoro-cytidine
  modified_base 12: mod_base = OTHER; note = 2' Fluoro-cytidine
  modified_base 13: mod_base = OTHER; note = 2'O-methyl-cytidine
  modified_base 14: mod_base = OTHER; note = 2'O-methyl-adenosine
  modified_base 15: mod_base = OTHER; note = 2'O-methyl-guanosine
  modified_base 16: mod_base = OTHER; note = 2'O-methyl-uridine
  modified_base 17: mod_base = OTHER; note = 2'O-methyl-guanosine
  modified_base 18: mod_base = OTHER; note = 2'O-methyl-guanosine
  modified_base 19: mod_base = OTHER; note = 2'O-methyl-adenosine
  modified_base 20: mod_base = OTHER; note = 2'O-methyl-adenosine
  modified_base 21: mod_base = OTHER; note = 2'O-methyl-adenosine
  modified_base 1..2: mod_base = OTHER; note = phosphorothioate linkage
  modified_base 2..3: mod_base = OTHER; note = phosphorothioate linkage
  modified_base 19..20: mod_base = OTHER; note = phosphorothioate linkage
  modified_base 20..21: mod_base = OTHER; note = phosphorothioate linkage
  source 1..21: mol_type = other RNA
tgaataaattcccagtggaaa

SEQ ID NO: 723 - RNA, 21 nt, synthetic construct
  misc_feature 1..21: note = siRNA sequence name:ETXS553
  modified_base 1: mod_base = OTHER; note = 2'O-methyl-cytidine
  modified_base 2: mod_base = OTHER; note = 2'O-methyl-uridine
  modified_base 3: mod_base = OTHER; note = 2'O-methyl-guanosine
  modified_base 4: mod_base = OTHER; note = 2'O-methyl-cytidine
  modified_base 5: mod_base = OTHER; note = 2'O-methyl-adenosine
  modified_base 6: mod_base = OTHER; note = 2'O-methyl-uridine
  modified_base 7: mod_base = OTHER; note = 2' Fluoro-cytidine
  modified_base 8: mod_base = OTHER; note = 2'O-methyl-uridine
  modified_base 9: mod_base = OTHER; note = 2'Fluoro-adenosine
  modified_base 10: mod_base = OTHER; note = 2' Fluoro-cytidine
  modified_base 11: mod_base = OTHER; note = 2' Fluoro-uridine
  modified_base 12: mod_base = OTHER; note = 2' Fluoro-uridine
  modified_base 13: mod_base = OTHER; note = 2'O-methyl-cytidine
  modified_base 14: mod_base = OTHER; note = 2'O-methyl-adenosine
  modified_base 15: mod_base = OTHER; note = 2'O-methyl-adenosine
  modified_base 16: mod_base = OTHER; note = 2'O-methyl-adenosine
  modified_base 17: mod_base = OTHER; note = 2'O-methyl-guanosine
  modified_base 18: mod_base = OTHER; note = 2'O-methyl-guanosine
  modified_base 19: mod_base = OTHER; note = 2'O-methyl-adenosine
  modified_base 20: mod_base = OTHER; note = 2'O-methyl-uridine
  modified_base 21: mod_base = OTHER; note = 2'O-methyl-cytidine
  modified_base 1..2: mod_base = OTHER; note = phosphorothioate linkage
  modified_base 2..3: mod_base = OTHER; note = phosphorothioate linkage
  modified_base 19..20: mod_base = OTHER; note = phosphorothioate linkage
  modified_base 20..21: mod_base = OTHER; note = phosphorothioate linkage
  source 1..21: mol_type = other RNA
ctgcatctacttcaaaggatc

SEQ ID NO: 724 - RNA, 21 nt, synthetic construct
  misc_feature 1..21: note = siRNA sequence name:ETXS555
  modified_base 1: mod_base = OTHER; note = 2'O-methyl-adenosine
  modified_base 2: mod_base = OTHER; note = 2'O-methyl-cytidine
  modified_base 3: mod_base = OTHER; note = 2'O-methyl-uridine
  modified_base 4: mod_base = OTHER; note = 2'O-methyl-guanosine
  modified_base 5: mod_base = OTHER; note = 2'O-methyl-cytidine
  modified_base 6: mod_base = OTHER; note = 2'O-methyl-adenosine
  modified_base 7: mod_base = OTHER; note = 2' Fluoro-uridine
  modified_base 8: mod_base = OTHER; note = 2'O-methyl-cytidine
  modified_base 9: mod_base = OTHER; note = 2' Fluoro-uridine
  modified_base 10: mod_base = OTHER; note = 2'Fluoro-adenosine
  modified_base 11: mod_base = OTHER; note = 2' Fluoro-cytidine
  modified_base 12: mod_base = OTHER; note = 2' Fluoro-uridine
  modified_base 13: mod_base = OTHER; note = 2'O-methyl-uridine
  modified_base 14: mod_base = OTHER; note = 2'O-methyl-cytidine
  modified_base 15: mod_base = OTHER; note = 2'O-methyl-adenosine
  modified_base 16: mod_base = OTHER; note = 2'O-methyl-adenosine
  modified_base 17: mod_base = OTHER; note = 2'O-methyl-adenosine
  modified_base 18: mod_base = OTHER; note = 2'O-methyl-guanosine
  modified_base 19: mod_base = OTHER; note = 2'O-methyl-guanosine
  modified_base 20: mod_base = OTHER; note = 2'O-methyl-adenosine
  modified_base 21: mod_base = OTHER; note = 2'O-methyl-uridine
  modified_base 1..2: mod_base = OTHER; note = phosphorothioate linkage
  modified_base 2..3: mod_base = OTHER; note = phosphorothioate linkage
  modified_base 19..20: mod_base = OTHER; note = phosphorothioate linkage
  modified_base 20..21: mod_base = OTHER; note = phosphorothioate linkage
  source 1..21: mol_type = other RNA
actgcatctacttcaaaggat

SEQ ID NO: 725 - RNA, 21 nt, synthetic construct
  misc_feature 1..21: note = siRNA sequence name:ETXS557
  modified_base 1: mod_base = OTHER; note = 2'O-methyl-guanosine
  modified_base 2: mod_base = OTHER; note = 2'O-methyl-guanosine
  modified_base 3: mod_base = OTHER; note = 2'O-methyl-guanosine
  modified_base 4: mod_base = OTHER; note = 2'O-methyl-adenosine
  modified_base 5: mod_base = OTHER; note = 2'O-methyl-guanosine
  modified_base 6: mod_base = OTHER; note = 2'O-methyl-adenosine
  modified_base 7: mod_base = OTHER; note = 2' Fluoro-guanosine
  modified_base 8: mod_base = OTHER; note = 2'O-methyl-adenosine
  modified_base 9: mod_base = OTHER; note = 2' Fluoro-cytidine
  modified_base 10: mod_base = OTHER; note = 2' Fluoro-cytidine
  modified_base 11: mod_base = OTHER; note = 2' Fluoro-cytidine
  modified_base 12: mod_base = OTHER; note = 2'Fluoro-adenosine
  modified_base 13: mod_base = OTHER; note = 2'O-methyl-uridine
  modified_base 14: mod_base = OTHER; note = 2'O-methyl-guanosine
  modified_base 15: mod_base = OTHER; note = 2'O-methyl-adenosine
  modified_base 16: mod_base = OTHER; note = 2'O-methyl-adenosine
  modified_base 17: mod_base = OTHER; note = 2'O-methyl-cytidine
  modified_base 18: mod_base = OTHER; note = 2'O-methyl-adenosine
  modified_base 19: mod_base = OTHER; note = 2'O-methyl-adenosine
  modified_base 20: mod_base = OTHER; note = 2'O-methyl-guanosine
  modified_base 21: mod_base = OTHER; note = 2'O-methyl-uridine
  modified_base 1..2: mod_base = OTHER; note = phosphorothioate linkage
  modified_base 2..3: mod_base = OTHER; note = phosphorothioate linkage
  modified_base 19..20: mod_base = OTHER; note = phosphorothioate linkage
  modified_base 20..21: mod_base = OTHER; note = phosphorothioate linkage
  source 1..21: mol_type = other RNA
gggagagacccatgaacaagt

SEQ ID NO: 726 - RNA, 21 nt, synthetic construct
  misc_feature 1..21: note = siRNA sequence name:ETXS559
  modified_base 1: mod_base = OTHER; note = 2'O-methyl-guanosine
  modified_base 2: mod_base = OTHER; note = 2'O-methyl-guanosine
  modified_base 3: mod_base = OTHER; note = 2'O-methyl-uridine
  modified_base 4: mod_base = OTHER; note = 2'O-methyl-guanosine
  modified_base 5: mod_base = OTHER; note = 2'O-methyl-adenosine
  modified_base 6: mod_base = OTHER; note = 2'O-methyl-adenosine
  modified_base 7: mod_base = OTHER; note = 2' Fluoro-uridine
  modified_base 8: mod_base = OTHER; note = 2'O-methyl-adenosine
  modified_base 9: mod_base = OTHER; note = 2'Fluoro-adenosine
  modified_base 10: mod_base = OTHER; note = 2'Fluoro-adenosine
  modified_base 11: mod_base = OTHER; note = 2' Fluoro-uridine
  modified_base 12: mod_base = OTHER; note = 2' Fluoro-uridine
  modified_base 13: mod_base = OTHER; note = 2'O-methyl-cytidine
  modified_base 14: mod_base = OTHER; note = 2'O-methyl-cytidine
  modified_base 15: mod_base = OTHER; note = 2'O-methyl-cytidine
  modified_base 16: mod_base = OTHER; note = 2'O-methyl-adenosine
  modified_base 17: mod_base = OTHER; note = 2'O-methyl-guanosine
  modified_base 18: mod_base = OTHER; note = 2'O-methyl-uridine
  modified_base 19: mod_base = OTHER; note = 2'O-methyl-guanosine
  modified_base 20: mod_base = OTHER; note = 2'O-methyl-guanosine
  modified_base 21: mod_base = OTHER; note = 2'O-methyl-adenosine
  modified_base 1..2: mod_base = OTHER; note = phosphorothioate linkage
  modified_base 2..3: mod_base = OTHER; note = phosphorothioate linkage
  modified_base 19..20: mod_base = OTHER; note = phosphorothioate linkage
  modified_base 20..21: mod_base = OTHER; note = phosphorothioate linkage
  source 1..21: mol_type = other RNA
ggtgaataaattcccagtgga

SEQ ID NO: 727 - RNA, 21 nt, synthetic construct
  misc_feature 1..21: note = siRNA sequence name:ETXS561
  modified_base 1: mod_base = OTHER; note = 2'O-methyl-uridine
  modified_base 2: mod_base = OTHER; note = 2'O-methyl-cytidine
  modified_base 3: mod_base = OTHER; note = 2'O-methyl-adenosine
  modified_base 4: mod_base = OTHER; note = 2'O-methyl-guanosine
  modified_base 5: mod_base = OTHER; note = 2'O-methyl-guanosine
  modified_base 6: mod_base = OTHER; note = 2'O-methyl-adenosine
  modified_base 7: mod_base = OTHER; note = 2' Fluoro-guanosine
  modified_base 8: mod_base = OTHER; note = 2'O-methyl-guanosine
  modified_base 9: mod_base = OTHER; note = 2'Fluoro-adenosine
  modified_base 10: mod_base = OTHER; note = 2'Fluoro-adenosine
  modified_base 11: mod_base = OTHER; note = 2' Fluoro-uridine
  modified_base 12: mod_base = OTHER; note = 2' Fluoro-uridine
  modified_base 13: mod_base = OTHER; note = 2'O-methyl-uridine
  modified_base 14: mod_base = OTHER; note = 2'O-methyl-uridine
  modified_base 15: mod_base = OTHER; note = 2'O-methyl-guanosine
  modified_base 16: mod_base = OTHER; note = 2'O-methyl-guanosine
  modified_base 17: mod_base = OTHER; note = 2'O-methyl-guanosine
  modified_base 18: mod_base = OTHER; note = 2'O-methyl-uridine
  modified_base 19: mod_base = OTHER; note = 2'O-methyl-adenosine
  modified_base 20: mod_base = OTHER; note = 2'O-methyl-cytidine
  modified_base 21: mod_base = OTHER; note = 2'O-methyl-adenosine
  modified_base 1..2: mod_base = OTHER; note = phosphorothioate linkage
  modified_base 2..3: mod_base = OTHER; note = phosphorothioate linkage
  modified_base 19..20: mod_base = OTHER; note = phosphorothioate linkage
  modified_base 20..21: mod_base = OTHER; note = phosphorothioate linkage
  source 1..21: mol_type = other RNA
tcaggaggaattttgggtaca

SEQ ID NO: 728 - RNA, 21 nt, synthetic construct
  misc_feature 1..21: note = siRNA sequence name:ETXS563
  modified_base 1: mod_base = OTHER; note = 2'O-methyl-guanosine
  modified_base 2: mod_base = OTHER; note = 2'O-methyl-cytidine
  modified_base 3: mod_base = OTHER; note = 2'O-methyl-uridine
  modified_base 4: mod_base = OTHER; note = 2'O-methyl-guanosine
  modified_base 5: mod_base = OTHER; note = 2'O-methyl-cytidine
  modified_base 6: mod_base = OTHER; note = 2'O-methyl-cytidine
  modified_base 7: mod_base = OTHER; note = 2' Fluoro-uridine
  modified_base 8: mod_base = OTHER; note = 2'O-methyl-guanosine
  modified_base 9: mod_base = OTHER; note = 2' Fluoro-cytidine
  modified_base 10: mod_base = OTHER; note = 2' Fluoro-uridine
  modified_base 11: mod_base = OTHER; note = 2' Fluoro-cytidine
  modified_base 12: mod_base = OTHER; note = 2' Fluoro-uridine
  modified_base 13: mod_base = OTHER; note = 2'O-methyl-uridine
  modified_base 14: mod_base = OTHER; note = 2'O-methyl-cytidine
  modified_base 15: mod_base = OTHER; note = 2'O-methyl-adenosine
  modified_base 16: mod_base = OTHER; note = 2'O-methyl-uridine
  modified_base 17: mod_base = OTHER; note = 2'O-methyl-guanosine
  modified_base 18: mod_base = OTHER; note = 2'O-methyl-guanosine
  modified_base 19: mod_base = OTHER; note = 2'O-methyl-guanosine
  modified_base 20: mod_base = OTHER; note = 2'O-methyl-adenosine
  modified_base 21: mod_base = OTHER; note = 2'O-methyl-adenosine
  modified_base 1..2: mod_base = OTHER; note = phosphorothioate linkage
  modified_base 2..3: mod_base = OTHER; note = phosphorothioate linkage
  modified_base 19..20: mod_base = OTHER; note = phosphorothioate linkage
  modified_base 20..21: mod_base = OTHER; note = phosphorothioate linkage
  source 1..21: mol_type = other RNA
gctgcctgctcttcatgggaa

SEQ ID NO: 729 - RNA, 21 nt, synthetic construct
  misc_feature 1..21: note = siRNA sequence name:ETXS565
  modified_base 1: mod_base = OTHER; note = 2'O-methyl-cytidine
  modified_base 2: mod_base = OTHER; note = 2'O-methyl-adenosine
  modified_base 3: mod_base = OTHER; note = 2'O-methyl-cytidine
  modified_base 4: mod_base = OTHER; note = 2'O-methyl-cytidine
  modified_base 5: mod_base = OTHER; note = 2'O-methyl-adenosine
  modified_base 6: mod_base = OTHER; note = 2'O-methyl-adenosine
  modified_base 7: mod_base = OTHER; note = 2' Fluoro-guanosine
  modified_base 8: mod_base = OTHER; note = 2'O-methyl-guanosine
  modified_base 9: mod_base = OTHER; note = 2' Fluoro-guanosine
  modified_base 10: mod_base = OTHER; note = 2' Fluoro-cytidine
  modified_base 11: mod_base = OTHER; note = 2' Fluoro-cytidine
  modified_base 12: mod_base = OTHER; note = 2' Fluoro-uridine
  modified_base 13: mod_base = OTHER; note = 2'O-methyl-cytidine
  modified_base 14: mod_base = OTHER; note = 2'O-methyl-adenosine
  modified_base 15: mod_base = OTHER; note = 2'O-methyl-uridine
  modified_base 16: mod_base = OTHER; note = 2'O-methyl-adenosine
  modified_base 17: mod_base = OTHER; note = 2'O-methyl-adenosine
  modified_base 18: mod_base = OTHER; note = 2'O-methyl-adenosine
  modified_base 19: mod_base = OTHER; note = 2'O-methyl-adenosine
  modified_base 20: mod_base = OTHER; note = 2'O-methyl-guanosine
  modified_base 21: mod_base = OTHER; note = 2'O-methyl-adenosine
  modified_base 1..2: mod_base = OTHER; note = phosphorothioate linkage
  modified_base 2..3: mod_base = OTHER; note = phosphorothioate linkage
  modified_base 19..20: mod_base = OTHER; note = phosphorothioate linkage
  modified_base 20..21: mod_base = OTHER; note = phosphorothioate linkage
  source 1..21: mol_type = other RNA
caccaagggcctcataaaaga

SEQ ID NO: 730 - RNA, 21 nt, synthetic construct
  misc_feature 1..21: note = siRNA sequence name:ETXS567
  modified_base 1: mod_base = OTHER; note = 2'O-methyl-cytidine
  modified_base 2: mod_base = OTHER; note = 2'O-methyl-cytidine
  modified_base 3: mod_base = OTHER; note = 2'O-methyl-uridine
  modified_base 4: mod_base = OTHER; note = 2'O-methyl-uridine
  modified_base 5: mod_base = OTHER; note = 2'O-methyl-uridine
  modified_base 6: mod_base = OTHER; note = 2'O-methyl-adenosine
  modified_base 7: mod_base = OTHER; note = 2' Fluoro-uridine
  modified_base 8: mod_base = OTHER; note = 2'O-methyl-adenosine
  modified_base 9: mod_base = OTHER; note = 2' Fluoro-uridine
  modified_base 10: mod_base = OTHER; note = 2' Fluoro-cytidine
  modified_base 11: mod_base = OTHER; note = 2' Fluoro-cytidine
  modified_base 12: mod_base = OTHER; note = 2'Fluoro-adenosine
  modified_base 13: mod_base = OTHER; note = 2'O-methyl-guanosine
  modified_base 14: mod_base = OTHER; note = 2'O-methyl-adenosine
  modified_base 15: mod_base = OTHER; note = 2'O-methyl-adenosine
  modified_base 16: mod_base = OTHER; note = 2'O-methyl-guanosine
  modified_base 17: mod_base = OTHER; note = 2'O-methyl-cytidine
  modified_base 18: mod_base = OTHER; note = 2'O-methyl-adenosine
  modified_base 19: mod_base = OTHER; note = 2'O-methyl-guanosine
  modified_base 20: mod_base = OTHER; note = 2'O-methyl-uridine
  modified_base 21: mod_base = OTHER; note = 2'O-methyl-uridine
  modified_base 1..2: mod_base = OTHER; note = phosphorothioate linkage
  modified_base 2..3: mod_base = OTHER; note = phosphorothioate linkage
  modified_base 19..20: mod_base = OTHER; note = phosphorothioate linkage
  modified_base 20..21: mod_base = OTHER; note = phosphorothioate linkage
  source 1..21: mol_type = other RNA
cctttatatccagaagcagtt

SEQ ID NO: 731 - RNA, 21 nt, synthetic construct
  misc_feature 1..21: note = siRNA sequence name:ETXS569
  modified_base 1: mod_base = OTHER; note = 2'O-methyl-cytidine
  modified_base 2: mod_base = OTHER; note = 2'O-methyl-adenosine
  modified_base 3: mod_base = OTHER; note = 2'O-methyl-adenosine
  modified_base 4: mod_base = OTHER; note = 2'O-methyl-cytidine
  modified_base 5: mod_base = OTHER; note = 2'O-methyl-uridine
  modified_base 6: mod_base = OTHER; note = 2'O-methyl-guanosine
  modified_base 7: mod_base = OTHER; note = 2' Fluoro-cytidine
  modified_base 8: mod_base = OTHER; note = 2'O-methyl-adenosine
  modified_base 9: mod_base = OTHER; note = 2' Fluoro-uridine
  modified_base 10: mod_base = OTHER; note = 2' Fluoro-cytidine
  modified_base 11: mod_base = OTHER; note = 2' Fluoro-uridine
  modified_base 12: mod_base = OTHER; note = 2'Fluoro-adenosine
  modified_base 13: mod_base = OTHER; note = 2'O-methyl-cytidine
  modified_base 14: mod_base = OTHER; note = 2'O-methyl-uridine
  modified_base 15: mod_base = OTHER; note = 2'O-methyl-uridine
  modified_base 16: mod_base = OTHER; note = 2'O-methyl-cytidine
  modified_base 17: mod_base = OTHER; note = 2'O-methyl-adenosine
  modified_base 18: mod_base = OTHER; note = 2'O-methyl-adenosine
  modified_base 19: mod_base = OTHER; note = 2'O-methyl-adenosine
  modified_base 20: mod_base = OTHER; note = 2'O-methyl-guanosine
  modified_base 21: mod_base = OTHER; note = 2'O-methyl-guanosine
  modified_base 1..2: mod_base = OTHER; note = phosphorothioate linkage
  modified_base 2..3: mod_base = OTHER; note = phosphorothioate linkage
  modified_base 19..20: mod_base = OTHER; note = phosphorothioate linkage
  modified_base 20..21: mod_base = OTHER; note = phosphorothioate linkage
  source 1..21: mol_type = other RNA
caactgcatctacttcaaagg

SEQ ID NO: 732 - RNA, 21 nt, synthetic construct
  misc_feature 1..21: note = siRNA sequence name:ETXS571
  modified_base 1: mod_base = OTHER; note = 2'O-methyl-guanosine
  modified_base 2: mod_base = OTHER; note = 2'O-methyl-adenosine
  modified_base 3: mod_base = OTHER; note = 2'O-methyl-guanosine
  modified_base 4: mod_base = OTHER; note = 2'O-methyl-cytidine
  modified_base 5: mod_base = OTHER; note = 2'O-methyl-cytidine
  modified_base 6: mod_base = OTHER; note = 2'O-methyl-guanosine
  modified_base 7: mod_base = OTHER; note = 2' Fluoro-guanosine
  modified_base 8: mod_base = OTHER; note = 2'O-methyl-adenosine
  modified_base 9: mod_base = OTHER; note = 2' Fluoro-uridine
  modified_base 10: mod_base = OTHER; note = 2' Fluoro-cytidine
  modified_base 11: mod_base = OTHER; note = 2' Fluoro-cytidine
  modified_base 12: mod_base = OTHER; note = 2'Fluoro-adenosine
  modified_base 13: mod_base = OTHER; note = 2'O-methyl-guanosine
  modified_base 14: mod_base = OTHER; note = 2'O-methyl-cytidine
  modified_base 15: mod_base = OTHER; note = 2'O-methyl-guanosine
  modified_base 16: mod_base = OTHER; note = 2'O-methyl-uridine
  modified_base 17: mod_base = OTHER; note = 2'O-methyl-cytidine
  modified_base 18: mod_base = OTHER; note = 2'O-methyl-uridine
  modified_base 19: mod_base = OTHER; note = 2'O-methyl-uridine
  modified_base 20: mod_base = OTHER; note = 2'O-methyl-adenosine
  modified_base 21: mod_base = OTHER; note = 2'O-methyl-adenosine
  modified_base 1..2: mod_base = OTHER; note = phosphorothioate linkage
  modified_base 2..3: mod_base = OTHER; note = phosphorothioate linkage
  modified_base 19..20: mod_base = OTHER; note = phosphorothioate linkage
  modified_base 20..21: mod_base = OTHER; note = phosphorothioate linkage
  source 1..21: mol_type = other RNA
gagccggatccagcgtcttaa

SEQ ID NO: 733 - RNA, 21 nt, synthetic construct
  misc_feature 1..21: note = siRNA sequence name:ETXS573
  modified_base 1: mod_base = OTHER; note = 2'O-methyl-adenosine
  modified_base 2: mod_base = OTHER; note = 2'O-methyl-uridine
  modified_base 3: mod_base = OTHER; note = 2'O-methyl-cytidine
  modified_base 4: mod_base = OTHER; note = 2'O-methyl-cytidine
  modified_base 5: mod_base = OTHER; note = 2'O-methyl-adenosine
  modified_base 6: mod_base = OTHER; note = 2'O-methyl-guanosine
  modified_base 7: mod_base = OTHER; note = 2' Fluoro-cytidine
  modified_base 8: mod_base = OTHER; note = 2'O-methyl-guanosine
  modified_base 9: mod_base = OTHER; note = 2' Fluoro-uridine
  modified_base 10: mod_base = OTHER; note = 2' Fluoro-cytidine
  modified_base 11: mod_base = OTHER; note = 2' Fluoro-uridine
  modified_base 12: mod_base = OTHER; note = 2' Fluoro-uridine
  modified_base 13: mod_base = OTHER; note = 2'O-methyl-adenosine
  modified_base 14: mod_base = OTHER; note = 2'O-methyl-adenosine
  modified_base 15: mod_base = OTHER; note = 2'O-methyl-cytidine
  modified_base 16: mod_base = OTHER; note = 2'O-methyl-adenosine
  modified_base 17: mod_base = OTHER; note = 2'O-methyl-uridine
  modified_base 18: mod_base = OTHER; note = 2'O-methyl-cytidine
  modified_base 19: mod_base = OTHER; note = 2'O-methyl-cytidine
  modified_base 20: mod_base = OTHER; note = 2'O-methyl-uridine
  modified_base 21: mod_base = OTHER; note = 2'O-methyl-cytidine
  modified_base 1..2: mod_base = OTHER; note = phosphorothioate linkage
  modified_base 2..3: mod_base = OTHER; note = phosphorothioate linkage
  modified_base 19..20: mod_base = OTHER; note = phosphorothioate linkage
  modified_base 20..21: mod_base = OTHER; note = phosphorothioate linkage
  source 1..21: mol_type = other RNA
atccagcgtcttaacatcctc

SEQ ID NO: 734 - RNA, 21 nt, synthetic construct
  misc_feature 1..21: note = siRNA sequence name:ETXS575
  modified_base 1: mod_base = OTHER; note = 2'O-methyl-cytidine
  modified_base 2: mod_base = OTHER; note = 2'O-methyl-adenosine
  modified_base 3: mod_base = OTHER; note = 2'O-methyl-adenosine
  modified_base 4: mod_base = OTHER; note = 2'O-methyl-adenosine
  modified_base 5: mod_base = OTHER; note = 2'O-methyl-adenosine
  modified_base 6: mod_base = OTHER; note = 2'O-methyl-adenosine
  modified_base 7: mod_base = OTHER; note = 2'Fluoro-adenosine
  modified_base 8: mod_base = OTHER; note = 2'O-methyl-guanosine
  modified_base 9: mod_base = OTHER; note = 2' Fluoro-cytidine
  modified_base 10: mod_base = OTHER; note = 2'Fluoro-adenosine
  modified_base 11: mod_base = OTHER; note = 2' Fluoro-uridine
  modified_base 12: mod_base = OTHER; note = 2' Fluoro-guanosine
  modified_base 13: mod_base = OTHER; note = 2'O-methyl-adenosine
  modified_base 14: mod_base = OTHER; note = 2'O-methyl-cytidine
  modified_base 15: mod_base = OTHER; note = 2'O-methyl-adenosine
  modified_base 16: mod_base = OTHER; note = 2'O-methyl-adenosine
  modified_base 17: mod_base = OTHER; note = 2'O-methyl-adenosine
  modified_base 18: mod_base = OTHER; note = 2'O-methyl-cytidine
  modified_base 19: mod_base = OTHER; note = 2'O-methyl-adenosine
  modified_base 20: mod_base = OTHER; note = 2'O-methyl-guanosine
  modified_base 21: mod_base = OTHER; note = 2'O-methyl-adenosine
  modified_base 1..2: mod_base = OTHER; note = phosphorothioate linkage
  modified_base 2..3: mod_base = OTHER; note = phosphorothioate linkage
  modified_base 19..20: mod_base = OTHER; note = phosphorothioate linkage
  modified_base 20..21: mod_base = OTHER; note = phosphorothioate linkage
  source 1..21: mol_type = other RNA
caaaaaagcatgacaaacaga

SEQ ID NO: 735 - RNA, 21 nt, synthetic construct
  misc_feature 1..21: note = siRNA sequence name:ETXS577
  modified_base 1: mod_base = OTHER; note = 2'O-methyl-cytidine
  modified_base 2: mod_base = OTHER; note = 2'O-methyl-adenosine
  modified_base 3: mod_base = OTHER; note = 2'O-methyl-guanosine
  modified_base 4: mod_base = OTHER; note = 2'O-methyl-guanosine
  modified_base 5: mod_base = OTHER; note = 2'O-methyl-adenosine
  modified_base 6: mod_base = OTHER; note = 2'O-methyl-guanosine
  modified_base 7: mod_base = OTHER; note = 2' Fluoro-guanosine
  modified_base 8: mod_base = OTHER; note = 2'O-methyl-adenosine
  modified_base 9: mod_base = OTHER; note = 2'Fluoro-adenosine
  modified_base 10: mod_base = OTHER; note = 2' Fluoro-uridine
  modified_base 11: mod_base = OTHER; note = 2' Fluoro-uridine
  modified_base 12: mod_base = OTHER; note = 2' Fluoro-uridine
  modified_base 13: mod_base = OTHER; note = 2'O-methyl-uridine
  modified_base 14: mod_base = OTHER; note = 2'O-methyl-guanosine
  modified_base 15: mod_base = OTHER; note = 2'O-methyl-guanosine
  modified_base 16: mod_base = OTHER; note = 2'O-methyl-guanosine
  modified_base 17: mod_base = OTHER; note = 2'O-methyl-uridine
  modified_base 18: mod_base = OTHER; note = 2'O-methyl-adenosine
  modified_base 19: mod_base = OTHER; note = 2'O-methyl-cytidine
  modified_base 20: mod_base = OTHER; note = 2'O-methyl-adenosine
  modified_base 21: mod_base = OTHER; note = 2'O-methyl-cytidine
  modified_base 1..2: mod_base = OTHER; note = phosphorothioate linkage
  modified_base 2..3: mod_base = OTHER; note = phosphorothioate linkage
  modified_base 19..20: mod_base = OTHER; note = phosphorothioate linkage
  modified_base 20..21: mod_base = OTHER; note = phosphorothioate linkage
  source 1..21: mol_type = other RNA
caggaggaattttgggtacac

SEQ ID NO: 736 - RNA, 21 nt, synthetic construct
  misc_feature 1..21: note = siRNA sequence name:ETXS579
  modified_base 1: mod_base = OTHER; note = 2'O-methyl-cytidine
  modified_base 2: mod_base = OTHER; note = 2'O-methyl-adenosine
  modified_base 3: mod_base = OTHER; note = 2'O-methyl-adenosine
  modified_base 4: mod_base = OTHER; note = 2'O-methyl-cytidine
  modified_base 5: mod_base = OTHER; note = 2'O-methyl-cytidine
  modified_base 6: mod_base = OTHER; note = 2'O-methyl-adenosine
  modified_base 7: mod_base = OTHER; note = 2' Fluoro-cytidine
  modified_base 8: mod_base = OTHER; note = 2'O-methyl-adenosine
  modified_base 9: mod_base = OTHER; note = 2'Fluoro-adenosine
  modified_base 10: mod_base = OTHER; note = 2' Fluoro-cytidine
  modified_base 11: mod_base = OTHER; note = 2' Fluoro-uridine
  modified_base 12: mod_base = OTHER; note = 2' Fluoro-uridine
  modified_base 13: mod_base = OTHER; note = 2'O-methyl-cytidine
  modified_base 14: mod_base = OTHER; note = 2'O-methyl-cytidine
  modified_base 15: mod_base = OTHER; note = 2'O-methyl-guanosine
  modified_base 16: mod_base = OTHER; note = 2'O-methyl-guanosine
  modified_base 17: mod_base = OTHER; note = 2'O-methyl-cytidine
  modified_base 18: mod_base = OTHER; note = 2'O-methyl-uridine
  modified_base 19: mod_base = OTHER; note = 2'O-methyl-guanosine
  modified_base 20: mod_base = OTHER; note = 2'O-methyl-adenosine
  modified_base 21: mod_base = OTHER; note = 2'O-methyl-adenosine
  modified_base 1..2: mod_base = OTHER; note = phosphorothioate linkage
  modified_base 2..3: mod_base = OTHER; note = phosphorothioate linkage
  modified_base 19..20: mod_base = OTHER; note = phosphorothioate linkage
  modified_base 20..21: mod_base = OTHER; note = phosphorothioate linkage
  source 1..21: mol_type = other RNA
caaccacaacttccggctgaa

SEQ ID NO: 737 - RNA, 21 nt, synthetic construct
  misc_feature 1..21: note = siRNA sequence name:ETXS581
  modified_base 1: mod_base = OTHER; note = 2'O-methyl-guanosine
  modified_base 2: mod_base = OTHER; note = 2'O-methyl-guanosine
  modified_base 3: mod_base = OTHER; note = 2'O-methyl-cytidine
  modified_base 4: mod_base = OTHER; note = 2'O-methyl-adenosine
  modified_base 5: mod_base = OTHER; note = 2'O-methyl-adenosine
  modified_base 6: mod_base = OTHER; note = 2'O-methyl-adenosine
  modified_base 7: mod_base = OTHER; note = 2'Fluoro-adenosine
  modified_base 8: mod_base = OTHER; note = 2'O-methyl-adenosine
  modified_base 9: mod_base = OTHER; note = 2'Fluoro-adenosine
  modified_base 10: mod_base = OTHER; note = 2' Fluoro-guanosine
  modified_base 11: mod_base = OTHER; note = 2' Fluoro-cytidine
  modified_base 12: mod_base = OTHER; note = 2'Fluoro-adenosine
  modified_base 13: mod_base = OTHER; note = 2'O-methyl-uridine
  modified_base 14: mod_base = OTHER; note = 2'O-methyl-guanosine
  modified_base 15: mod_base = OTHER; note = 2'O-methyl-adenosine
  modified_base 16: mod_base = OTHER; note = 2'O-methyl-cytidine
  modified_base 17: mod_base = OTHER; note = 2'O-methyl-adenosine
  modified_base 18: mod_base = OTHER; note = 2'O-methyl-adenosine
  modified_base 19: mod_base = OTHER; note = 2'O-methyl-adenosine
  modified_base 20: mod_base = OTHER; note = 2'O-methyl-cytidine
  modified_base 21: mod_base = OTHER; note = 2'O-methyl-adenosine
  modified_base 1..2: mod_base = OTHER; note = phosphorothioate linkage
  modified_base 2..3: mod_base = OTHER; note = phosphorothioate linkage
  modified_base 19..20: mod_base = OTHER; note = phosphorothioate linkage
  modified_base 20..21: mod_base = OTHER; note = phosphorothioate linkage
  source 1..21: mol_type = other RNA
ggcaaaaaagcatgacaaaca

SEQ ID NO: 738 - RNA, 21 nt, synthetic construct
  misc_feature 1..21: note = siRNA sequence name:ETXS583
  modified_base 1: mod_base = OTHER; note = 2'O-methyl-guanosine
  modified_base 2: mod_base = OTHER; note = 2'O-methyl-adenosine
  modified_base 3: mod_base = OTHER; note = 2'O-methyl-adenosine
  modified_base 4: mod_base = OTHER; note = 2'O-methyl-uridine
  modified_base 5: mod_base = OTHER; note = 2'O-methyl-adenosine
  modified_base 6: mod_base = OTHER; note = 2'O-methyl-adenosine
  modified_base 7: mod_base = OTHER; note = 2'Fluoro-adenosine
  modified_base 8: mod_base = OTHER; note = 2'O-methyl-uridine
  modified_base 9: mod_base = OTHER; note = 2' Fluoro-uridine
  modified_base 10: mod_base = OTHER; note = 2' Fluoro-cytidine
  modified_base 11: mod_base = OTHER; note = 2' Fluoro-cytidine
  modified_base 12: mod_base = OTHER; note = 2' Fluoro-cytidine
  modified_base 13: mod_base = OTHER; note = 2'O-methyl-adenosine
  modified_base 14: mod_base = OTHER; note = 2'O-methyl-guanosine
  modified_base 15: mod_base = OTHER; note = 2'O-methyl-uridine
  modified_base 16: mod_base = OTHER; note = 2'O-methyl-guanosine
  modified_base 17: mod_base = OTHER; note = 2'O-methyl-guanosine
  modified_base 18: mod_base = OTHER; note = 2'O-methyl-adenosine
  modified_base 19: mod_base = OTHER; note = 2'O-methyl-adenosine
  modified_base 20: mod_base = OTHER; note = 2'O-methyl-adenosine
  modified_base 21: mod_base = OTHER; note = 2'O-methyl-uridine
  modified_base 1..2: mod_base = OTHER; note = phosphorothioate linkage
  modified_base 2..3: mod_base = OTHER; note = phosphorothioate linkage
  modified_base 19..20: mod_base = OTHER; note = phosphorothioate linkage
  modified_base 20..21: mod_base = OTHER; note = phosphorothioate linkage
  source 1..21: mol_type = other RNA
gaataaattcccagtggaaat

SEQ ID NO: 739 - RNA, 21 nt, synthetic construct
  misc_feature 1..21: note = siRNA sequence name:ETXS585
  modified_base 1: mod_base = OTHER; note = 2'O-methyl-guanosine
  modified_base 2: mod_base = OTHER; note = 2'O-methyl-guanosine
  modified_base 3: mod_base = OTHER; note = 2'O-methyl-guanosine
  modified_base 4: mod_base = OTHER; note = 2'O-methyl-cytidine
  modified_base 5: mod_base = OTHER; note = 2'O-methyl-adenosine
  modified_base 6: mod_base = OTHER; note = 2'O-methyl-uridine
  modified_base 7: mod_base = OTHER; note = 2' Fluoro-cytidine
  modified_base 8: mod_base = OTHER; note = 2'O-methyl-adenosine
  modified_base 9: mod_base = OTHER; note = 2' Fluoro-guanosine
  modified_base 10: mod_base = OTHER; note = 2' Fluoro-cytidine
  modified_base 11: mod_base = OTHER; note = 2'Fluoro-adenosine
  modified_base 12: mod_base = OTHER; note = 2' Fluoro-uridine
  modified_base 13: mod_base = OTHER; note = 2'O-methyl-guanosine
  modified_base 14: mod_base = OTHER; note = 2'O-methyl-cytidine
  modified_base 15: mod_base = OTHER; note = 2'O-methyl-uridine
  modified_base 16: mod_base = OTHER; note = 2'O-methyl-adenosine
  modified_base 17: mod_base = OTHER; note = 2'O-methyl-adenosine
  modified_base 18: mod_base = OTHER; note = 2'O-methyl-uridine
  modified_base 19: mod_base = OTHER; note = 2'O-methyl-uridine
  modified_base 20: mod_base = OTHER; note = 2'O-methyl-guanosine
  modified_base 21: mod_base = OTHER; note = 2'O-methyl-uridine
  modified_base 1..2: mod_base = OTHER; note = phosphorothioate linkage
  modified_base 2..3: mod_base = OTHER; note = phosphorothioate linkage
  modified_base 19..20: mod_base = OTHER; note = phosphorothioate linkage
  modified_base 20..21: mod_base = OTHER; note = phosphorothioate linkage
  source 1..21: mol_type = other RNA
gggcatcagcatgctaattgt

SEQ ID NO: 740 - RNA, 21 nt, synthetic construct
  misc_feature 1..21: note = siRNA sequence name:ETXS587
  modified_base 1: mod_base = OTHER; note = 2'O-methyl-adenosine
  modified_base 2: mod_base = OTHER; note = 2'O-methyl-adenosine
  modified_base 3: mod_base = OTHER; note = 2'O-methyl-adenosine
  modified_base 4: mod_base = OTHER; note = 2'O-methyl-adenosine
  modified_base 5: mod_base = OTHER; note = 2'O-methyl-adenosine
  modified_base 6: mod_base = OTHER; note = 2'O-methyl-guanosine
  modified_base 7: mod_base = OTHER; note = 2' Fluoro-cytidine
  modified_base 8: mod_base = OTHER; note = 2'O-methyl-adenosine
  modified_base 9: mod_base = OTHER; note = 2' Fluoro-uridine
  modified_base 10: mod_base = OTHER; note = 2' Fluoro-guanosine
  modified_base 11: mod_base = OTHER; note = 2'Fluoro-adenosine
  modified_base 12: mod_base = OTHER; note = 2' Fluoro-cytidine
  modified_base 13: mod_base = OTHER; note = 2'O-methyl-adenosine
  modified_base 14: mod_base = OTHER; note = 2'O-methyl-adenosine
  modified_base 15: mod_base = OTHER; note = 2'O-methyl-adenosine
  modified_base 16: mod_base = OTHER; note = 2'O-methyl-cytidine
  modified_base 17: mod_base = OTHER; note = 2'O-methyl-adenosine
  modified_base 18: mod_base = OTHER; note = 2'O-methyl-guanosine
  modified_base 19: mod_base = OTHER; note = 2'O-methyl-adenosine
  modified_base 20: mod_base = OTHER; note = 2'O-methyl-adenosine
  modified_base 21: mod_base = OTHER; note = 2'O-methyl-cytidine
  modified_base 1..2: mod_base = OTHER; note = phosphorothioate linkage
  modified_base 2..3: mod_base = OTHER; note = phosphorothioate linkage
  modified_base 19..20: mod_base = OTHER; note = phosphorothioate linkage
  modified_base 20..21: mod_base = OTHER; note = phosphorothioate linkage
  source 1..21: mol_type = other RNA
aaaaagcatgacaaacagaac

SEQ ID NO: 741 - RNA, 21 nt, synthetic construct
  misc_feature 1..21: note = siRNA sequence name:ETXS589
  modified_base 1: mod_base = OTHER; note = 2'O-methyl-guanosine
  modified_base 2: mod_base = OTHER; note = 2'O-methyl-adenosine
  modified_base 3: mod_base = OTHER; note = 2'O-methyl-guanosine
  modified_base 4: mod_base = OTHER; note = 2'O-methyl-uridine
  modified_base 5: mod_base = OTHER; note = 2'O-methyl-adenosine
  modified_base 6: mod_base = OTHER; note = 2'O-methyl-uridine
  modified_base 7: mod_base = OTHER; note = 2' Fluoro-uridine
  modified_base 8: mod_base = OTHER; note = 2'O-methyl-adenosine
  modified_base 9: mod_base = OTHER; note = 2' Fluoro-cytidine
  modified_base 10: mod_base = OTHER; note = 2' Fluoro-uridine
  modified_base 11: mod_base = OTHER; note = 2' Fluoro-uridine
  modified_base 12: mod_base = OTHER; note = 2' Fluoro-uridine
  modified_base 13: mod_base = OTHER; note = 2'O-methyl-guanosine
  modified_base 14: mod_base = OTHER; note = 2'O-methyl-cytidine
  modified_base 15: mod_base = OTHER; note = 2'O-methyl-uridine
  modified_base 16: mod_base = OTHER; note = 2'O-methyl-guanosine
  modified_base 17: mod_base = OTHER; note = 2'O-methyl-adenosine
  modified_base 18: mod_base = OTHER; note = 2'O-methyl-guanosine
  modified_base 19: mod_base = OTHER; note = 2'O-methyl-guanosine
  modified_base 20: mod_base = OTHER; note = 2'O-methyl-cytidine
  modified_base 21: mod_base = OTHER; note = 2'O-methyl-cytidine
  modified_base 1..2: mod_base = OTHER; note = phosphorothioate linkage
  modified_base 2..3: mod_base = OTHER; note = phosphorothioate linkage
  modified_base 19..20: mod_base = OTHER; note = phosphorothioate linkage
  modified_base 20..21: mod_base = OTHER; note = phosphorothioate linkage
  source 1..21: mol_type = other RNA
gagtattactttgctgaggcc

SEQ ID NO: 742 - RNA, 21 nt, synthetic construct
  misc_feature 1..21: note = siRNA sequence name:ETXS591
  modified_base 1: mod_base = OTHER; note = 2'O-methyl-uridine
  modified_base 2: mod_base = OTHER; note = 2'O-methyl-guanosine
  modified_base 3: mod_base = OTHER; note = 2'O-methyl-adenosine
  modified_base 4: mod_base = OTHER; note = 2'O-methyl-adenosine
  modified_base 5: mod_base = OTHER; note = 2'O-methyl-uridine
  modified_base 6: mod_base = OTHER; note = 2'O-methyl-adenosine
  modified_base 7: mod_base = OTHER; note = 2'Fluoro-adenosine
  modified_base 8: mod_base = OTHER; note = 2'O-methyl-adenosine
  modified_base 9: mod_base = OTHER; note = 2' Fluoro-uridine
  modified_base 10: mod_base = OTHER; note = 2' Fluoro-uridine
  modified_base 11: mod_base = OTHER; note = 2' Fluoro-cytidine
  modified_base 12: mod_base = OTHER; note = 2' Fluoro-cytidine
  modified_base 13: mod_base = OTHER; note = 2'O-methyl-cytidine
  modified_base 14: mod_base = OTHER; note = 2'O-methyl-adenosine
  modified_base 15: mod_base = OTHER; note = 2'O-methyl-guanosine
  modified_base 16: mod_base = OTHER; note = 2'O-methyl-uridine
  modified_base 17: mod_base = OTHER; note = 2'O-methyl-guanosine
  modified_base 18: mod_base = OTHER; note = 2'O-methyl-guanosine
  modified_base 19: mod_base = OTHER; note = 2'O-methyl-adenosine
  modified_base 20: mod_base = OTHER; note = 2'O-methyl-adenosine
  modified_base 21: mod_base = OTHER; note = 2'O-methyl-adenosine
  modified_base 1..2: mod_base = OTHER; note = phosphorothioate linkage
  modified_base 2..3: mod_base = OTHER; note = phosphorothioate linkage
  modified_base 19..20: mod_base = OTHER; note = phosphorothioate linkage
  modified_base 20..21: mod_base = OTHER; note = phosphorothioate linkage
  source 1..21: mol_type = other RNA
tgaataaattcccagtggaaa

SEQ ID NO: 743 - RNA, 21 nt, synthetic construct
  misc_feature 1..21: note = siRNA sequence name:ETXS593
  modified_base 1: mod_base = OTHER; note = 2'O-methyl-cytidine
  modified_base 2: mod_base = OTHER; note = 2'O-methyl-uridine
  modified_base 3: mod_base = OTHER; note = 2'O-methyl-guanosine
  modified_base 4: mod_base = OTHER; note = 2'O-methyl-cytidine
  modified_base 5: mod_base = OTHER; note = 2'O-methyl-adenosine
  modified_base 6: mod_base = OTHER; note = 2'O-methyl-uridine
  modified_base 7: mod_base = OTHER; note = 2' Fluoro-cytidine
  modified_base 8: mod_base = OTHER; note = 2'O-methyl-uridine
  modified_base 9: mod_base = OTHER; note = 2'Fluoro-adenosine
  modified_base 10: mod_base = OTHER; note = 2' Fluoro-cytidine
  modified_base 11: mod_base = OTHER; note = 2' Fluoro-uridine
  modified_base 12: mod_base = OTHER; note = 2' Fluoro-uridine
  modified_base 13: mod_base = OTHER; note = 2'O-methyl-cytidine
  modified_base 14: mod_base = OTHER; note = 2'O-methyl-adenosine
  modified_base 15: mod_base = OTHER; note = 2'O-methyl-adenosine
  modified_base 16: mod_base = OTHER; note = 2'O-methyl-adenosine
  modified_base 17: mod_base = OTHER; note = 2'O-methyl-guanosine
  modified_base 18: mod_base = OTHER; note = 2'O-methyl-guanosine
  modified_base 19: mod_base = OTHER; note = 2'O-methyl-adenosine
  modified_base 20: mod_base = OTHER; note = 2'O-methyl-uridine
  modified_base 21: mod_base = OTHER; note = 2'O-methyl-cytidine
  modified_base 1..2: mod_base = OTHER; note = phosphorothioate linkage
  modified_base 2..3: mod_base = OTHER; note = phosphorothioate linkage
  modified_base 19..20: mod_base = OTHER; note = phosphorothioate linkage
  modified_base 20..21: mod_base = OTHER; note = phosphorothioate linkage
  source 1..21: mol_type = other RNA
ctgcatctacttcaaaggatc

SEQ ID NO: 744 - RNA, 21 nt, synthetic construct
  misc_feature 1..21: note = siRNA sequence name:ETXS595
  modified_base 1: mod_base = OTHER; note = 2'O-methyl-adenosine
  modified_base 2: mod_base = OTHER; note = 2'O-methyl-cytidine
  modified_base 3: mod_base = OTHER; note = 2'O-methyl-uridine
  modified_base 4: mod_base = OTHER; note = 2'O-methyl-guanosine
  modified_base 5: mod_base = OTHER; note = 2'O-methyl-cytidine
  modified_base 6: mod_base = OTHER; note = 2'O-methyl-adenosine
  modified_base 7: mod_base = OTHER; note = 2' Fluoro-uridine
  modified_base 8: mod_base = OTHER; note = 2'O-methyl-cytidine
  modified_base 9: mod_base = OTHER; note = 2' Fluoro-uridine
  modified_base 10: mod_base = OTHER; note = 2'Fluoro-adenosine
  modified_base 11: mod_base = OTHER; note = 2' Fluoro-cytidine
  modified_base 12: mod_base = OTHER; note = 2' Fluoro-uridine
  modified_base 13: mod_base = OTHER; note = 2'O-methyl-uridine
  modified_base 14: mod_base = OTHER; note = 2'O-methyl-cytidine
  modified_base 15: mod_base = OTHER; note = 2'O-methyl-adenosine
  modified_base 16: mod_base = OTHER; note = 2'O-methyl-adenosine
  modified_base 17: mod_base = OTHER; note = 2'O-methyl-adenosine
  modified_base 18: mod_base = OTHER; note = 2'O-methyl-guanosine
  modified_base 19: mod_base = OTHER; note = 2'O-methyl-guanosine
  modified_base 20: mod_base = OTHER; note = 2'O-methyl-adenosine
  modified_base 21: mod_base = OTHER; note = 2'O-methyl-uridine
  modified_base 1..2: mod_base = OTHER; note = phosphorothioate linkage
  modified_base 2..3: mod_base = OTHER; note = phosphorothioate linkage
  modified_base 19..20: mod_base = OTHER; note = phosphorothioate linkage
  modified_base 20..21: mod_base = OTHER; note = phosphorothioate linkage
  source 1..21: mol_type = other RNA
actgcatctacttcaaaggat

SEQ ID NO: 745 - RNA, 21 nt, synthetic construct
  misc_feature 1..21: note = siRNA sequence name:ETXS597
  modified_base 1: mod_base = OTHER; note = 2'O-methyl-guanosine
  modified_base 2: mod_base = OTHER; note = 2'O-methyl-guanosine
  modified_base 3: mod_base = OTHER; note = 2'O-methyl-guanosine
  modified_base 4: mod_base = OTHER; note = 2'O-methyl-adenosine
  modified_base 5: mod_base = OTHER; note = 2'O-methyl-guanosine
  modified_base 6: mod_base = OTHER; note = 2'O-methyl-adenosine
  modified_base 7: mod_base = OTHER; note = 2' Fluoro-guanosine
  modified_base 8: mod_base = OTHER; note = 2'O-methyl-adenosine
  modified_base 9: mod_base = OTHER; note = 2' Fluoro-cytidine
  modified_base 10: mod_base = OTHER; note = 2' Fluoro-cytidine
  modified_base 11: mod_base = OTHER; note = 2' Fluoro-cytidine
  modified_base 12: mod_base = OTHER; note = 2'Fluoro-adenosine
  modified_base 13: mod_base = OTHER; note = 2'O-methyl-uridine
  modified_base 14: mod_base = OTHER; note = 2'O-methyl-guanosine
  modified_base 15: mod_base = OTHER; note = 2'O-methyl-adenosine
  modified_base 16: mod_base = OTHER; note = 2'O-methyl-adenosine
  modified_base 17: mod_base = OTHER; note = 2'O-methyl-cytidine
  modified_base 18: mod_base = OTHER; note = 2'O-methyl-adenosine
  modified_base 19: mod_base = OTHER; note = 2'O-methyl-adenosine
  modified_base 20: mod_base = OTHER; note = 2'O-methyl-guanosine
  modified_base 21: mod_base = OTHER; note = 2'O-methyl-uridine
  modified_base 1..2: mod_base = OTHER; note = phosphorothioate linkage
  modified_base 2..3: mod_base = OTHER; note = phosphorothioate linkage
  modified_base 19..20: mod_base = OTHER; note = phosphorothioate linkage
  modified_base 20..21: mod_base = OTHER; note = phosphorothioate linkage
  source 1..21: mol_type = other RNA
gggagagacccatgaacaagt

SEQ ID NO: 746 - RNA, 21 nt, synthetic construct
  misc_feature 1..21: note = siRNA sequence name:ETXS599
  modified_base 1: mod_base = OTHER; note = 2'O-methyl-guanosine
  modified_base 2: mod_base = OTHER; note = 2'O-methyl-guanosine
  modified_base 3: mod_base = OTHER; note = 2'O-methyl-uridine
  modified_base 4: mod_base = OTHER; note = 2'O-methyl-guanosine
  modified_base 5: mod_base = OTHER; note = 2'O-methyl-adenosine
  modified_base 6: mod_base = OTHER; note = 2'O-methyl-adenosine
  modified_base 7: mod_base = OTHER; note = 2' Fluoro-uridine
  modified_base 8: mod_base = OTHER; note = 2'O-methyl-adenosine
  modified_base 9: mod_base = OTHER; note = 2'Fluoro-adenosine
  modified_base 10: mod_base = OTHER; note = 2'Fluoro-adenosine
  modified_base 11: mod_base = OTHER; note = 2' Fluoro-uridine
  modified_base 12: mod_base = OTHER; note = 2' Fluoro-uridine
  modified_base 13: mod_base = OTHER; note = 2'O-methyl-cytidine
  modified_base 14: mod_base = OTHER; note = 2'O-methyl-cytidine
  modified_base 15: mod_base = OTHER; note = 2'O-methyl-cytidine
  modified_base 16: mod_base = OTHER; note = 2'O-methyl-adenosine
  modified_base 17: mod_base = OTHER; note = 2'O-methyl-guanosine
  modified_base 18: mod_base = OTHER; note = 2'O-methyl-uridine
  modified_base 19: mod_base = OTHER; note = 2'O-methyl-guanosine
  modified_base 20: mod_base = OTHER; note = 2'O-methyl-guanosine
  modified_base 21: mod_base = OTHER; note = 2'O-methyl-adenosine
  modified_base 1..2: mod_base = OTHER; note = phosphorothioate linkage
  modified_base 2..3: mod_base = OTHER; note = phosphorothioate linkage
  modified_base 19..20: mod_base = OTHER; note = phosphorothioate linkage
  modified_base 20..21: mod_base = OTHER; note = phosphorothioate linkage
  source 1..21: mol_type = other RNA
ggtgaataaattcccagtgga

SEQ ID NO: 747 - RNA, 21 nt, synthetic construct
  misc_feature 1..21: note = siRNA sequence name:ETXS601
  modified_base 1: mod_base = OTHER; note = 2'O-methyl-uridine
  modified_base 2: mod_base = OTHER; note = 2'O-methyl-cytidine
  modified_base 3: mod_base = OTHER; note = 2'O-methyl-adenosine
  modified_base 4: mod_base = OTHER; note = 2'O-methyl-guanosine
  modified_base 5: mod_base = OTHER; note = 2'O-methyl-guanosine
  modified_base 6: mod_base = OTHER; note = 2'O-methyl-adenosine
  modified_base 7: mod_base = OTHER; note = 2' Fluoro-guanosine
  modified_base 8: mod_base = OTHER; note = 2'O-methyl-guanosine
  modified_base 9: mod_base = OTHER; note = 2'Fluoro-adenosine
  modified_base 10: mod_base = OTHER; note = 2'Fluoro-adenosine
  modified_base 11: mod_base = OTHER; note = 2' Fluoro-uridine
  modified_base 12: mod_base = OTHER; note = 2' Fluoro-uridine
  modified_base 13: mod_base = OTHER; note = 2'O-methyl-uridine
  modified_base 14: mod_base = OTHER; note = 2'O-methyl-uridine
  modified_base 15: mod_base = OTHER; note = 2'O-methyl-guanosine
  modified_base 16: mod_base = OTHER; note = 2'O-methyl-guanosine
  modified_base 17: mod_base = OTHER; note = 2'O-methyl-guanosine
  modified_base 18: mod_base = OTHER; note = 2'O-methyl-uridine
  modified_base 19: mod_base = OTHER; note = 2'O-methyl-adenosine
  modified_base 20: mod_base = OTHER; note = 2'O-methyl-cytidine
  modified_base 21: mod_base = OTHER; note = 2'O-methyl-adenosine
  modified_base 1..2: mod_base = OTHER; note = phosphorothioate linkage
  modified_base 2..3: mod_base = OTHER; note = phosphorothioate linkage
  modified_base 19..20: mod_base = OTHER; note = phosphorothioate linkage
  modified_base 20..21: mod_base = OTHER; note = phosphorothioate linkage
  source 1..21: mol_type = other RNA
tcaggaggaattttgggtaca

SEQ ID NO: 748 - RNA, 21 nt, synthetic construct
  misc_feature 1..21: note = siRNA sequence name:ETXS603
  modified_base 1: mod_base = OTHER; note = 2'O-methyl-guanosine
  modified_base 2: mod_base = OTHER; note = 2'O-methyl-cytidine
  modified_base 3: mod_base = OTHER; note = 2'O-methyl-uridine
  modified_base 4: mod_base = OTHER; note = 2'O-methyl-guanosine
  modified_base 5: mod_base = OTHER; note = 2'O-methyl-cytidine
  modified_base 6: mod_base = OTHER; note = 2'O-methyl-cytidine
  modified_base 7: mod_base = OTHER; note = 2' Fluoro-uridine
  modified_base 8: mod_base = OTHER; note = 2'O-methyl-guanosine
  modified_base 9: mod_base = OTHER; note = 2' Fluoro-cytidine
  modified_base 10: mod_base = OTHER; note = 2' Fluoro-uridine
  modified_base 11: mod_base = OTHER; note = 2' Fluoro-cytidine
  modified_base 12: mod_base = OTHER; note = 2' Fluoro-uridine
  modified_base 13: mod_base = OTHER; note = 2'O-methyl-uridine
  modified_base 14: mod_base = OTHER; note = 2'O-methyl-cytidine
  modified_base 15: mod_base = OTHER; note = 2'O-methyl-adenosine
  modified_base 16: mod_base = OTHER; note = 2'O-methyl-uridine
  modified_base 17: mod_base = OTHER; note = 2'O-methyl-guanosine
  modified_base 18: mod_base = OTHER; note = 2'O-methyl-guanosine
  modified_base 19: mod_base = OTHER; note = 2'O-methyl-guanosine
  modified_base 20: mod_base = OTHER; note = 2'O-methyl-adenosine
  modified_base 21: mod_base = OTHER; note = 2'O-methyl-adenosine
  modified_base 1..2: mod_base = OTHER; note = phosphorothioate linkage
  modified_base 2..3: mod_base = OTHER; note = phosphorothioate linkage
  modified_base 19..20: mod_base = OTHER; note = phosphorothioate linkage
  modified_base 20..21: mod_base = OTHER; note = phosphorothioate linkage
  source 1..21: mol_type = other RNA
gctgcctgctcttcatgggaa

SEQ ID NO: 749 - RNA, 21 nt, synthetic construct
  misc_feature 1..21: note = siRNA sequence name:ETXS605
  modified_base 1: mod_base = OTHER; note = 2'O-methyl-cytidine
  modified_base 2: mod_base = OTHER; note = 2'O-methyl-adenosine
  modified_base 3: mod_base = OTHER; note = 2'O-methyl-cytidine
  modified_base 4: mod_base = OTHER; note = 2'O-methyl-cytidine
  modified_base 5: mod_base = OTHER; note = 2'O-methyl-adenosine
  modified_base 6: mod_base = OTHER; note = 2'O-methyl-adenosine
  modified_base 7: mod_base = OTHER; note = 2' Fluoro-guanosine
  modified_base 8: mod_base = OTHER; note = 2'O-methyl-guanosine
  modified_base 9: mod_base = OTHER; note = 2' Fluoro-guanosine
  modified_base 10: mod_base = OTHER; note = 2' Fluoro-cytidine
  modified_base 11: mod_base = OTHER; note = 2' Fluoro-cytidine
  modified_base 12: mod_base = OTHER; note = 2' Fluoro-uridine
  modified_base 13: mod_base = OTHER; note = 2'O-methyl-cytidine
  modified_base 14: mod_base = OTHER; note = 2'O-methyl-adenosine
  modified_base 15: mod_base = OTHER; note = 2'O-methyl-uridine
  modified_base 16: mod_base = OTHER; note = 2'O-methyl-adenosine
  modified_base 17: mod_base = OTHER; note = 2'O-methyl-adenosine
  modified_base 18: mod_base = OTHER; note = 2'O-methyl-adenosine
  modified_base 19: mod_base = OTHER; note = 2'O-methyl-adenosine
  modified_base 20: mod_base = OTHER; note = 2'O-methyl-guanosine
  modified_base 21: mod_base = OTHER; note = 2'O-methyl-adenosine
  modified_base 1..2: mod_base = OTHER; note = phosphorothioate linkage
  modified_base 2..3: mod_base = OTHER; note = phosphorothioate linkage
  modified_base 19..20: mod_base = OTHER; note = phosphorothioate linkage
  modified_base 20..21: mod_base = OTHER; note = phosphorothioate linkage
  source 1..21: mol_type = other RNA
caccaagggcctcataaaaga

SEQ ID NO: 750 - RNA, 21 nt, synthetic construct
  misc_feature 1..21: note = siRNA sequence name:ETXS607
  modified_base 1: mod_base = OTHER; note = 2'O-methyl-cytidine
  modified_base 2: mod_base = OTHER; note = 2'O-methyl-cytidine
  modified_base 3: mod_base = OTHER; note = 2'O-methyl-uridine
  modified_base 4: mod_base = OTHER; note = 2'O-methyl-uridine
  modified_base 5: mod_base = OTHER; note = 2'O-methyl-uridine
  modified_base 6: mod_base = OTHER; note = 2'O-methyl-adenosine
  modified_base 7: mod_base = OTHER; note = 2' Fluoro-uridine
  modified_base 8: mod_base = OTHER; note = 2'O-methyl-adenosine
  modified_base 9: mod_base = OTHER; note = 2' Fluoro-uridine
  modified_base 10: mod_base = OTHER; note = 2' Fluoro-cytidine
  modified_base 11: mod_base = OTHER; note = 2' Fluoro-cytidine
  modified_base 12: mod_base = OTHER; note = 2'Fluoro-adenosine
  modified_base 13: mod_base = OTHER; note = 2'O-methyl-guanosine
  modified_base 14: mod_base = OTHER; note = 2'O-methyl-adenosine
  modified_base 15: mod_base = OTHER; note = 2'O-methyl-adenosine
  modified_base 16: mod_base = OTHER; note = 2'O-methyl-guanosine
  modified_base 17: mod_base = OTHER; note = 2'O-methyl-cytidine
  modified_base 18: mod_base = OTHER; note = 2'O-methyl-adenosine
  modified_base 19: mod_base = OTHER; note = 2'O-methyl-guanosine
  modified_base 20: mod_base = OTHER; note = 2'O-methyl-uridine
  modified_base 21: mod_base = OTHER; note = 2'O-methyl-uridine
  modified_base 1..2: mod_base = OTHER; note = phosphorothioate linkage
  modified_base 2..3: mod_base = OTHER; note = phosphorothioate linkage
  modified_base 19..20: mod_base = OTHER; note = phosphorothioate linkage
  modified_base 20..21: mod_base = OTHER; note = phosphorothioate linkage
  source 1..21: mol_type = other RNA
cctttatatccagaagcagtt

SEQ ID NO: 751 - RNA, 21 nt, synthetic construct
  misc_feature 1..21: note = siRNA sequence name:ETXS609
  modified_base 1: mod_base = OTHER; note = 2'O-methyl-cytidine
  modified_base 2: mod_base = OTHER; note = 2'O-methyl-adenosine
  modified_base 3: mod_base = OTHER; note = 2'O-methyl-adenosine
  modified_base 4: mod_base = OTHER; note = 2'O-methyl-cytidine
  modified_base 5: mod_base = OTHER; note = 2'O-methyl-uridine
  modified_base 6: mod_base = OTHER; note = 2'O-methyl-guanosine
  modified_base 7: mod_base = OTHER; note = 2' Fluoro-cytidine
  modified_base 8: mod_base = OTHER; note = 2'O-methyl-adenosine
  modified_base 9: mod_base = OTHER; note = 2' Fluoro-uridine
  modified_base 10: mod_base = OTHER; note = 2' Fluoro-cytidine
  modified_base 11: mod_base = OTHER; note = 2' Fluoro-uridine
  modified_base 12: mod_base = OTHER; note = 2'Fluoro-adenosine
  modified_base 13: mod_base = OTHER; note = 2'O-methyl-cytidine
  modified_base 14: mod_base = OTHER; note = 2'O-methyl-uridine
  modified_base 15: mod_base = OTHER; note = 2'O-methyl-uridine
  modified_base 16: mod_base = OTHER; note = 2'O-methyl-cytidine
  modified_base 17: mod_base = OTHER; note = 2'O-methyl-adenosine
  modified_base 18: mod_base = OTHER; note = 2'O-methyl-adenosine
  modified_base 19: mod_base = OTHER; note = 2'O-methyl-adenosine
  modified_base 20: mod_base = OTHER; note = 2'O-methyl-guanosine
  modified_base 21: mod_base = OTHER; note = 2'O-methyl-guanosine
  modified_base 1..2: mod_base = OTHER; note = phosphorothioate linkage
  modified_base 2..3: mod_base = OTHER; note = phosphorothioate linkage
  modified_base 19..20: mod_base = OTHER; note = phosphorothioate linkage
  modified_base 20..21: mod_base = OTHER; note = phosphorothioate linkage
  source 1..21: mol_type = other RNA
caactgcatctacttcaaagg

SEQ ID NO: 752 - RNA, 21 nt, synthetic construct
  misc_feature 1..21: note = siRNA sequence name:ETXS611
  modified_base 1: mod_base = OTHER; note = 2'O-methyl-guanosine
  modified_base 2: mod_base = OTHER; note = 2'O-methyl-adenosine
  modified_base 3: mod_base = OTHER; note = 2'O-methyl-guanosine
  modified_base 4: mod_base = OTHER; note = 2'O-methyl-cytidine
  modified_base 5: mod_base = OTHER; note = 2'O-methyl-cytidine
  modified_base 6: mod_base = OTHER; note = 2'O-methyl-guanosine
  modified_base 7: mod_base = OTHER; note = 2' Fluoro-guanosine
  modified_base 8: mod_base = OTHER; note = 2'O-methyl-adenosine
  modified_base 9: mod_base = OTHER; note = 2' Fluoro-uridine
  modified_base 10: mod_base = OTHER; note = 2' Fluoro-cytidine
  modified_base 11: mod_base = OTHER; note = 2' Fluoro-cytidine
  modified_base 12: mod_base = OTHER; note = 2'Fluoro-adenosine
  modified_base 13: mod_base = OTHER; note = 2'O-methyl-guanosine
  modified_base 14: mod_base = OTHER; note = 2'O-methyl-cytidine
  modified_base 15: mod_base = OTHER; note = 2'O-methyl-guanosine
  modified_base 16: mod_base = OTHER; note = 2'O-methyl-uridine
  modified_base 17: mod_base = OTHER; note = 2'O-methyl-cytidine
  modified_base 18: mod_base = OTHER; note = 2'O-methyl-uridine
  modified_base 19: mod_base = OTHER; note = 2'O-methyl-uridine
  modified_base 20: mod_base = OTHER; note = 2'O-methyl-adenosine
  modified_base 21: mod_base = OTHER; note = 2'O-methyl-adenosine
  modified_base 1..2: mod_base = OTHER; note = phosphorothioate linkage
  modified_base 2..3: mod_base = OTHER; note = phosphorothioate linkage
  modified_base 19..20: mod_base = OTHER; note = phosphorothioate linkage
  modified_base 20..21: mod_base = OTHER; note = phosphorothioate linkage
  source 1..21: mol_type = other RNA
gagccggatccagcgtcttaa

SEQ ID NO: 753 - RNA, 21 nt, synthetic construct
  misc_feature 1..21: note = siRNA sequence name:ETXS613
  modified_base 1: mod_base = OTHER; note = 2'O-methyl-adenosine
  modified_base 2: mod_base = OTHER; note = 2'O-methyl-uridine
  modified_base 3: mod_base = OTHER; note = 2'O-methyl-cytidine
  modified_base 4: mod_base = OTHER; note = 2'O-methyl-cytidine
  modified_base 5: mod_base = OTHER; note = 2'O-methyl-adenosine
  modified_base 6: mod_base = OTHER; note = 2'O-methyl-guanosine
  modified_base 7: mod_base = OTHER; note = 2' Fluoro-cytidine
  modified_base 8: mod_base = OTHER; note = 2'O-methyl-guanosine
  modified_base 9: mod_base = OTHER; note = 2' Fluoro-uridine
  modified_base 10: mod_base = OTHER; note = 2' Fluoro-cytidine
  modified_base 11: mod_base = OTHER; note = 2' Fluoro-uridine
  modified_base 12: mod_base = OTHER; note = 2' Fluoro-uridine
  modified_base 13: mod_base = OTHER; note = 2'O-methyl-adenosine
  modified_base 14: mod_base = OTHER; note = 2'O-methyl-adenosine
  modified_base 15: mod_base = OTHER; note = 2'O-methyl-cytidine
  modified_base 16: mod_base = OTHER; note = 2'O-methyl-adenosine
  modified_base 17: mod_base = OTHER; note = 2'O-methyl-uridine
  modified_base 18: mod_base = OTHER; note = 2'O-methyl-cytidine
  modified_base 19: mod_base = OTHER; note = 2'O-methyl-cytidine
  modified_base 20: mod_base = OTHER; note = 2'O-methyl-uridine
  modified_base 21: mod_base = OTHER; note = 2'O-methyl-cytidine
  modified_base 1..2: mod_base = OTHER; note = phosphorothioate linkage
  modified_base 2..3: mod_base = OTHER; note = phosphorothioate linkage
  modified_base 19..20: mod_base = OTHER; note = phosphorothioate linkage
  modified_base 20..21: mod_base = OTHER; note = phosphorothioate linkage
  source 1..21: mol_type = other RNA
atccagcgtcttaacatcctc

SEQ ID NO: 754 - RNA, 21 nt, synthetic construct
  misc_feature 1..21: note = siRNA sequence name:ETXS615
  modified_base 1: mod_base = OTHER; note = 2'O-methyl-cytidine
  modified_base 2: mod_base = OTHER; note = 2'O-methyl-adenosine
  modified_base 3: mod_base = OTHER; note = 2'O-methyl-adenosine
  modified_base 4: mod_base = OTHER; note = 2'O-methyl-adenosine
  modified_base 5: mod_base = OTHER; note = 2'O-methyl-adenosine
  modified_base 6: mod_base = OTHER; note = 2'O-methyl-adenosine
  modified_base 7: mod_base = OTHER; note = 2'Fluoro-adenosine
  modified_base 8: mod_base = OTHER; note = 2'O-methyl-guanosine
  modified_base 9: mod_base = OTHER; note = 2' Fluoro-cytidine
  modified_base 10: mod_base = OTHER; note = 2'Fluoro-adenosine
  modified_base 11: mod_base = OTHER; note = 2' Fluoro-uridine
  modified_base 12: mod_base = OTHER; note = 2' Fluoro-guanosine
  modified_base 13: mod_base = OTHER; note = 2'O-methyl-adenosine
  modified_base 14: mod_base = OTHER; note = 2'O-methyl-cytidine
  modified_base 15: mod_base = OTHER; note = 2'O-methyl-adenosine
  modified_base 16: mod_base = OTHER; note = 2'O-methyl-adenosine
  modified_base 17: mod_base = OTHER; note = 2'O-methyl-adenosine
  modified_base 18: mod_base = OTHER; note = 2'O-methyl-cytidine
  modified_base 19: mod_base = OTHER; note = 2'O-methyl-adenosine
  modified_base 20: mod_base = OTHER; note = 2'O-methyl-guanosine
  modified_base 21: mod_base = OTHER; note = 2'O-methyl-adenosine
  modified_base 1..2: mod_base = OTHER; note = phosphorothioate linkage
  modified_base 2..3: mod_base = OTHER; note = phosphorothioate linkage
  modified_base 19..20: mod_base = OTHER; note = phosphorothioate linkage
  modified_base 20..21: mod_base = OTHER; note = phosphorothioate linkage
  source 1..21: mol_type = other RNA
caaaaaagcatgacaaacaga

SEQ ID NO: 755 - RNA, 21 nt, synthetic construct
  misc_feature 1..21: note = siRNA sequence name:ETXS617
  modified_base 1: mod_base = OTHER; note = 2'O-methyl-cytidine
  modified_base 2: mod_base = OTHER; note = 2'O-methyl-adenosine
  modified_base 3: mod_base = OTHER; note = 2'O-methyl-guanosine
  modified_base 4: mod_base = OTHER; note = 2'O-methyl-guanosine
  modified_base 5: mod_base = OTHER; note = 2'O-methyl-adenosine
  modified_base 6: mod_base = OTHER; note = 2'O-methyl-guanosine
  modified_base 7: mod_base = OTHER; note = 2' Fluoro-guanosine
  modified_base 8: mod_base = OTHER; note = 2'O-methyl-adenosine
  modified_base 9: mod_base = OTHER; note = 2'Fluoro-adenosine
  modified_base 10: mod_base = OTHER; note = 2' Fluoro-uridine
  modified_base 11: mod_base = OTHER; note = 2' Fluoro-uridine
  modified_base 12: mod_base = OTHER; note = 2' Fluoro-uridine
  modified_base 13: mod_base = OTHER; note = 2'O-methyl-uridine
  modified_base 14: mod_base = OTHER; note = 2'O-methyl-guanosine
  modified_base 15: mod_base = OTHER; note = 2'O-methyl-guanosine
  modified_base 16: mod_base = OTHER; note = 2'O-methyl-guanosine
  modified_base 17: mod_base = OTHER; note = 2'O-methyl-uridine
  modified_base 18: mod_base = OTHER; note = 2'O-methyl-adenosine
  modified_base 19: mod_base = OTHER; note = 2'O-methyl-cytidine
  modified_base 20: mod_base = OTHER; note = 2'O-methyl-adenosine
  modified_base 21: mod_base = OTHER; note = 2'O-methyl-cytidine
  modified_base 1..2: mod_base = OTHER; note = phosphorothioate linkage
  modified_base 2..3: mod_base = OTHER; note = phosphorothioate linkage
  modified_base 19..20: mod_base = OTHER; note = phosphorothioate linkage
  modified_base 20..21: mod_base = OTHER; note = phosphorothioate linkage
  source 1..21: mol_type = other RNA
caggaggaattttgggtacac

SEQ ID NO: 756 - RNA, 21 nt, synthetic construct
  misc_feature 1..21: note = siRNA sequence name:ETXS619
  modified_base 1: mod_base = OTHER; note = 2'O-methyl-cytidine
  modified_base 2: mod_base = OTHER; note = 2'O-methyl-adenosine
  modified_base 3: mod_base = OTHER; note = 2'O-methyl-adenosine
  modified_base 4: mod_base = OTHER; note = 2'O-methyl-cytidine
  modified_base 5: mod_base = OTHER; note = 2'O-methyl-cytidine
  modified_base 6: mod_base = OTHER; note = 2'O-methyl-adenosine
  modified_base 7: mod_base = OTHER; note = 2' Fluoro-cytidine
  modified_base 8: mod_base = OTHER; note = 2'O-methyl-adenosine
  modified_base 9: mod_base = OTHER; note = 2'Fluoro-adenosine
  modified_base 10: mod_base = OTHER; note = 2' Fluoro-cytidine
  modified_base 11: mod_base = OTHER; note = 2' Fluoro-uridine
  modified_base 12: mod_base = OTHER; note = 2' Fluoro-uridine
  modified_base 13: mod_base = OTHER; note = 2'O-methyl-cytidine
  modified_base 14: mod_base = OTHER; note = 2'O-methyl-cytidine
  modified_base 15: mod_base = OTHER; note = 2'O-methyl-guanosine
  modified_base 16: mod_base = OTHER; note = 2'O-methyl-guanosine
  modified_base 17: mod_base = OTHER; note = 2'O-methyl-cytidine
  modified_base 18: mod_base = OTHER; note = 2'O-methyl-uridine
  modified_base 19: mod_base = OTHER; note = 2'O-methyl-guanosine
  modified_base 20: mod_base = OTHER; note = 2'O-methyl-adenosine
  modified_base 21: mod_base = OTHER; note = 2'O-methyl-adenosine
  modified_base 1..2: mod_base = OTHER; note = phosphorothioate linkage
  modified_base 2..3: mod_base = OTHER; note = phosphorothioate linkage
  modified_base 19..20: mod_base = OTHER; note = phosphorothioate linkage
  modified_base 20..21: mod_base = OTHER; note = phosphorothioate linkage
  source 1..21: mol_type = other RNA
caaccacaacttccggctgaa

SEQ ID NO: 757 - RNA, 21 nt, synthetic construct
  misc_feature 1..21: note = siRNA sequence name:ETXS621
  modified_base 1: mod_base = OTHER; note = 2'O-methyl-guanosine
  modified_base 2: mod_base = OTHER; note = 2'O-methyl-guanosine
  modified_base 3: mod_base = OTHER; note = 2'O-methyl-cytidine
  modified_base 4: mod_base = OTHER; note = 2'O-methyl-adenosine
  modified_base 5: mod_base = OTHER; note = 2'O-methyl-adenosine
  modified_base 6: mod_base = OTHER; note = 2'O-methyl-adenosine
  modified_base 7: mod_base = OTHER; note = 2'Fluoro-adenosine
  modified_base 8: mod_base = OTHER; note = 2'O-methyl-adenosine
  modified_base 9: mod_base = OTHER; note = 2'Fluoro-adenosine
  modified_base 10: mod_base = OTHER; note = 2' Fluoro-guanosine
  modified_base 11: mod_base = OTHER; note = 2' Fluoro-cytidine
  modified_base 12: mod_base = OTHER; note = 2'Fluoro-adenosine
  modified_base 13: mod_base = OTHER; note = 2'O-methyl-uridine
  modified_base 14: mod_base = OTHER; note = 2'O-methyl-guanosine
  modified_base 15: mod_base = OTHER; note = 2'O-methyl-adenosine
  modified_base 16: mod_base = OTHER; note = 2'O-methyl-cytidine
  modified_base 17: mod_base = OTHER; note = 2'O-methyl-adenosine
  modified_base 18: mod_base = OTHER; note = 2'O-methyl-adenosine
  modified_base 19: mod_base = OTHER; note = 2'O-methyl-adenosine
  modified_base 20: mod_base = OTHER; note = 2'O-methyl-cytidine
  modified_base 21: mod_base = OTHER; note = 2'O-methyl-adenosine
  modified_base 1..2: mod_base = OTHER; note = phosphorothioate linkage
  modified_base 2..3: mod_base = OTHER; note = phosphorothioate linkage
  modified_base 19..20: mod_base = OTHER; note = phosphorothioate linkage
  modified_base 20..21: mod_base = OTHER; note = phosphorothioate linkage
  source 1..21: mol_type = other RNA
ggcaaaaaagcatgacaaaca

SEQ ID NO: 758 - RNA, 21 nt, synthetic construct
  misc_feature 1..21: note = siRNA sequence name:ETXS623
  modified_base 1: mod_base = OTHER; note = 2'O-methyl-guanosine
  modified_base 2: mod_base = OTHER; note = 2'O-methyl-adenosine
  modified_base 3: mod_base = OTHER; note = 2'O-methyl-adenosine
  modified_base 4: mod_base = OTHER; note = 2'O-methyl-uridine
  modified_base 5: mod_base = OTHER; note = 2'O-methyl-adenosine
  modified_base 6: mod_base = OTHER; note = 2'O-methyl-adenosine
  modified_base 7: mod_base = OTHER; note = 2'Fluoro-adenosine
  modified_base 8: mod_base = OTHER; note = 2'O-methyl-uridine
  modified_base 9: mod_base = OTHER; note = 2' Fluoro-uridine
  modified_base 10: mod_base = OTHER; note = 2' Fluoro-cytidine
  modified_base 11: mod_base = OTHER; note = 2' Fluoro-cytidine
  modified_base 12: mod_base = OTHER; note = 2' Fluoro-cytidine
  modified_base 13: mod_base = OTHER; note = 2'O-methyl-adenosine
  modified_base 14: mod_base = OTHER; note = 2'O-methyl-guanosine
  modified_base 15: mod_base = OTHER; note = 2'O-methyl-uridine
  modified_base 16: mod_base = OTHER; note = 2'O-methyl-guanosine
  modified_base 17: mod_base = OTHER; note = 2'O-methyl-guanosine
  modified_base 18: mod_base = OTHER; note = 2'O-methyl-adenosine
  modified_base 19: mod_base = OTHER; note = 2'O-methyl-adenosine
  modified_base 20: mod_base = OTHER; note = 2'O-methyl-adenosine
  modified_base 21: mod_base = OTHER; note = 2'O-methyl-uridine
  modified_base 1..2: mod_base = OTHER; note = phosphorothioate linkage
  modified_base 2..3: mod_base = OTHER; note = phosphorothioate linkage
  modified_base 19..20: mod_base = OTHER; note = phosphorothioate linkage
  modified_base 20..21: mod_base = OTHER; note = phosphorothioate linkage
  source 1..21: mol_type = other RNA
gaataaattcccagtggaaat

SEQ ID NO: 759 - RNA, 21 nt, synthetic construct
  misc_feature 1..21: note = siRNA sequence name:ETXS625
  modified_base 1: mod_base = OTHER; note = 2'O-methyl-guanosine
  modified_base 2: mod_base = OTHER; note = 2'O-methyl-guanosine
  modified_base 3: mod_base = OTHER; note = 2'O-methyl-guanosine
  modified_base 4: mod_base = OTHER; note = 2'O-methyl-cytidine
  modified_base 5: mod_base = OTHER; note = 2'O-methyl-adenosine
  modified_base 6: mod_base = OTHER; note = 2'O-methyl-uridine
  modified_base 7: mod_base = OTHER; note = 2' Fluoro-cytidine
  modified_base 8: mod_base = OTHER; note = 2'O-methyl-adenosine
  modified_base 9: mod_base = OTHER; note = 2' Fluoro-guanosine
  modified_base 10: mod_base = OTHER; note = 2' Fluoro-cytidine
  modified_base 11: mod_base = OTHER; note = 2'Fluoro-adenosine
  modified_base 12: mod_base = OTHER; note = 2' Fluoro-uridine
  modified_base 13: mod_base = OTHER; note = 2'O-methyl-guanosine
  modified_base 14: mod_base = OTHER; note = 2'O-methyl-cytidine
  modified_base 15: mod_base = OTHER; note = 2'O-methyl-uridine
  modified_base 16: mod_base = OTHER; note = 2'O-methyl-adenosine
  modified_base 17: mod_base = OTHER; note = 2'O-methyl-adenosine
  modified_base 18: mod_base = OTHER; note = 2'O-methyl-uridine
  modified_base 19: mod_base = OTHER; note = 2'O-methyl-uridine
  modified_base 20: mod_base = OTHER; note = 2'O-methyl-guanosine
  modified_base 21: mod_base = OTHER; note = 2'O-methyl-uridine
  modified_base 1..2: mod_base = OTHER; note = phosphorothioate linkage
  modified_base 2..3: mod_base = OTHER; note = phosphorothioate linkage
  modified_base 19..20: mod_base = OTHER; note = phosphorothioate linkage
  modified_base 20..21: mod_base = OTHER; note = phosphorothioate linkage
  source 1..21: mol_type = other RNA
gggcatcagcatgctaattgt

SEQ ID NO: 760 - RNA, 21 nt, synthetic construct
  misc_feature 1..21: note = siRNA sequence name:ETXS627
  modified_base 1: mod_base = OTHER; note = 2'O-methyl-adenosine
  modified_base 2: mod_base = OTHER; note = 2'O-methyl-adenosine
  modified_base 3: mod_base = OTHER; note = 2'O-methyl-adenosine
  modified_base 4: mod_base = OTHER; note = 2'O-methyl-adenosine
  modified_base 5: mod_base = OTHER; note = 2'O-methyl-adenosine
  modified_base 6: mod_base = OTHER; note = 2'O-methyl-guanosine
  modified_base 7: mod_base = OTHER; note = 2' Fluoro-cytidine
  modified_base 8: mod_base = OTHER; note = 2'O-methyl-adenosine
  modified_base 9: mod_base = OTHER; note = 2' Fluoro-uridine
  modified_base 10: mod_base = OTHER; note = 2' Fluoro-guanosine
  modified_base 11: mod_base = OTHER; note = 2'Fluoro-adenosine
  modified_base 12: mod_base = OTHER; note = 2' Fluoro-cytidine
  modified_base 13: mod_base = OTHER; note = 2'O-methyl-adenosine
  modified_base 14: mod_base = OTHER; note = 2'O-methyl-adenosine
  modified_base 15: mod_base = OTHER; note = 2'O-methyl-adenosine
  modified_base 16: mod_base = OTHER; note = 2'O-methyl-cytidine
  modified_base 17: mod_base = OTHER; note = 2'O-methyl-adenosine
  modified_base 18: mod_base = OTHER; note = 2'O-methyl-guanosine
  modified_base 19: mod_base = OTHER; note = 2'O-methyl-adenosine
  modified_base 20: mod_base = OTHER; note = 2'O-methyl-adenosine
  modified_base 21: mod_base = OTHER; note = 2'O-methyl-cytidine
  modified_base 1..2: mod_base = OTHER; note = phosphorothioate linkage
  modified_base 2..3: mod_base = OTHER; note = phosphorothioate linkage
  modified_base 19..20: mod_base = OTHER; note = phosphorothioate linkage
  modified_base 20..21: mod_base = OTHER; note = phosphorothioate linkage
  source 1..21: mol_type = other RNA
aaaaagcatgacaaacagaac

SEQ ID NO: 761 - RNA, 21 nt, synthetic construct
  misc_feature 1..21: note = siRNA sequence name:ETXS629
  modified_base 1: mod_base = OTHER; note = 2'O-methyl-guanosine
  modified_base 2: mod_base = OTHER; note = 2'O-methyl-adenosine
  modified_base 3: mod_base = OTHER; note = 2'O-methyl-guanosine
  modified_base 4: mod_base = OTHER; note = 2'O-methyl-uridine
  modified_base 5: mod_base = OTHER; note = 2'O-methyl-adenosine
  modified_base 6: mod_base = OTHER; note = 2'O-methyl-uridine
  modified_base 7: mod_base = OTHER; note = 2' Fluoro-uridine
  modified_base 8: mod_base = OTHER; note = 2'O-methyl-adenosine
  modified_base 9: mod_base = OTHER; note = 2' Fluoro-cytidine
  modified_base 10: mod_base = OTHER; note = 2' Fluoro-uridine
  modified_base 11: mod_base = OTHER; note = 2' Fluoro-uridine
  modified_base 12: mod_base = OTHER; note = 2' Fluoro-uridine
  modified_base 13: mod_base = OTHER; note = 2'O-methyl-guanosine
  modified_base 14: mod_base = OTHER; note = 2'O-methyl-cytidine
  modified_base 15: mod_base = OTHER; note = 2'O-methyl-uridine
  modified_base 16: mod_base = OTHER; note = 2'O-methyl-guanosine
  modified_base 17: mod_base = OTHER; note = 2'O-methyl-adenosine
  modified_base 18: mod_base = OTHER; note = 2'O-methyl-guanosine
  modified_base 19: mod_base = OTHER; note = 2'O-methyl-guanosine
  modified_base 20: mod_base = OTHER; note = 2'O-methyl-cytidine
  modified_base 21: mod_base = OTHER; note = 2'O-methyl-cytidine
  modified_base 1..2: mod_base = OTHER; note = phosphorothioate linkage
  modified_base 2..3: mod_base = OTHER; note = phosphorothioate linkage
  modified_base 19..20: mod_base = OTHER; note = phosphorothioate linkage
  modified_base 20..21: mod_base = OTHER; note = phosphorothioate linkage
  source 1..21: mol_type = other RNA
gagtattactttgctgaggcc

SEQ ID NO: 762 - RNA, 23 nt, synthetic construct
  misc_feature 1..23: note = Description of sequence: ZPI siRNA antisense strand, modified; Strand ID: ETXS632; Based on: SEQ ID NO: 136
  source 1..23: mol_type = other RNA
  modified_base 1^2: mod_base = OTHER; note = phosphorothioate linkage
  modified_base 2^3: mod_base = OTHER; note = phosphorothioate linkage
  modified_base 21^22: mod_base = OTHER; note = phosphorothioate linkage
  modified_base 22^23: mod_base = OTHER; note = phosphorothioate linkage
  modified_base 1: mod_base = um
  modified_base 2: mod_base = OTHER; note = 2'Fluoro-uridine
  modified_base 3: mod_base = cm
  modified_base 4: mod_base = OTHER; note = 2'Fluoro-adenosine
  modified_base 5: mod_base = gm
  modified_base 6: mod_base = OTHER; note = 2'Fluoro-cytidine
  modified_base 7: mod_base = cm
  modified_base 8: mod_base = gm
  modified_base 9: mod_base = gm
  modified_base 10: mod_base = OTHER; note = 2'O-methyl-adenosine
  modified_base 11: mod_base = OTHER; note = 2'O-methyl-adenosine
  modified_base 12: mod_base = gm
  modified_base 13: mod_base = um
  modified_base 14: mod_base = OTHER; note = 2'Fluoro-uridine
  modified_base 15: mod_base = gm
  modified_base 16: mod_base = OTHER; note = 2'Fluoro-uridine
  modified_base 17: mod_base = gm
  modified_base 18: mod_base = gm
  modified_base 19: mod_base = um
  modified_base 20: mod_base = um
  modified_base 21: mod_base = gm
  modified_base 22: mod_base = um
  modified_base 23: mod_base = gm
ttcagccggaagttgtggttgtg

SEQ ID NO: 763 - RNA, 23 nt, synthetic construct
  misc_feature 1..23: note = Description of sequence: ZPI siRNA antisense strand, modified; Strand ID: ETXS634; Based on: SEQ ID NO: 136
  source 1..23: mol_type = other RNA
  modified_base 1^2: mod_base = OTHER; note = phosphorothioate linkage
  modified_base 2^3: mod_base = OTHER; note = phosphorothioate linkage
  modified_base 21^22: mod_base = OTHER; note = phosphorothioate linkage
  modified_base 22^23: mod_base = OTHER; note = phosphorothioate linkage
  modified_base 1: mod_base = um
  modified_base 2: mod_base = OTHER; note = 2'Fluoro-uridine
  modified_base 3: mod_base = cm
  modified_base 4: mod_base = OTHER; note = 2'O-methyl-adenosine
  modified_base 5: mod_base = gm
  modified_base 6: mod_base = OTHER; note = 2'Fluoro-cytidine
  modified_base 7: mod_base = cm
  modified_base 8: mod_base = OTHER; note = 2'Fluoro-guanosine
  modified_base 9: mod_base = gm
  modified_base 10: mod_base = OTHER; note = 2'O-methyl-adenosine
  modified_base 11: mod_base = OTHER; note = 2'O-methyl-adenosine
  modified_base 12: mod_base = gm
  modified_base 13: mod_base = um
  modified_base 14: mod_base = OTHER; note = 2'Fluoro-uridine
  modified_base 15: mod_base = gm
  modified_base 16: mod_base = OTHER; note = 2'Fluoro-uridine
  modified_base 17: mod_base = gm
  modified_base 18: mod_base = gm
  modified_base 19: mod_base = um
  modified_base 20: mod_base = um
  modified_base 21: mod_base = gm
  modified_base 22: mod_base = um
  modified_base 23: mod_base = gm
ttcagccggaagttgtggttgtg

SEQ ID NO: 764 - RNA, 23 nt, synthetic construct
  misc_feature 1..23: note = Description of sequence: ZPI siRNA antisense strand, modified; Strand ID: ETXS636; Based on: SEQ ID NO: 140
  source 1..23: mol_type = other RNA
  modified_base 1^2: mod_base = OTHER; note = phosphorothioate linkage
  modified_base 2^3: mod_base = OTHER; note = phosphorothioate linkage
  modified_base 21^22: mod_base = OTHER; note = phosphorothioate linkage
  modified_base 22^23: mod_base = OTHER; note = phosphorothioate linkage
  modified_base 1: mod_base = gm
  modified_base 2: mod_base = OTHER; note = 2'Fluoro-uridine
  modified_base 3: mod_base = um
  modified_base 4: mod_base = OTHER; note = 2'Fluoro-cytidine
  modified_base 5: mod_base = um
  modified_base 6: mod_base = OTHER; note = 2'Fluoro-guanosine
  modified_base 7: mod_base = um
  modified_base 8: mod_base = um
  modified_base 9: mod_base = um
  modified_base 10: mod_base = gm
  modified_base 11: mod_base = um
  modified_base 12: mod_base = cm
  modified_base 13: mod_base = OTHER; note = 2'O-methyl-adenosine
  modified_base 14: mod_base = OTHER; note = 2'Fluoro-uridine
  modified_base 15: mod_base = gm
  modified_base 16: mod_base = OTHER; note = 2'Fluoro-cytidine
  modified_base 17: mod_base = um
  modified_base 18: mod_base = um
  modified_base 19: mod_base = um
  modified_base 20: mod_base = um
  modified_base 21: mod_base = um
  modified_base 22: mod_base = um
  modified_base 23: mod_base = gm
gttctgtttgtcatgcttttttg

SEQ ID NO: 765 - RNA, 23 nt, synthetic construct
  misc_feature 1..23: note = Description of sequence: ZPI siRNA antisense strand, modified; Strand ID: ETXS638; Based on: SEQ ID NO: 140
  source 1..23: mol_type = other RNA
  modified_base 1^2: mod_base = OTHER; note = phosphorothioate linkage
  modified_base 2^3: mod_base = OTHER; note = phosphorothioate linkage
  modified_base 21^22: mod_base = OTHER; note = phosphorothioate linkage
  modified_base 22^23: mod_base = OTHER; note = phosphorothioate linkage
  modified_base 1: mod_base = gm
  modified_base 2: mod_base = OTHER; note = 2'Fluoro-uridine
  modified_base 3: mod_base = um
  modified_base 4: mod_base = cm
  modified_base 5: mod_base = um
  modified_base 6: mod_base = OTHER; note = 2'Fluoro-guanosine
  modified_base 7: mod_base = um
  modified_base 8: mod_base = OTHER; note = 2'Fluoro-uridine
  modified_base 9: mod_base = um
  modified_base 10: mod_base = gm
  modified_base 11: mod_base = um
  modified_base 12: mod_base = cm
  modified_base 13: mod_base = OTHER; note = 2'O-methyl-adenosine
  modified_base 14: mod_base = OTHER; note = 2'Fluoro-uridine
  modified_base 15: mod_base = gm
  modified_base 16: mod_base = OTHER; note = 2'Fluoro-cytidine
  modified_base 17: mod_base = um
  modified_base 18: mod_base = um
  modified_base 19: mod_base = um
  modified_base 20: mod_base = um
  modified_base 21: mod_base = um
  modified_base 22: mod_base = um
  modified_base 23: mod_base = gm
gttctgtttgtcatgcttttttg

SEQ ID NO: 766 - RNA, 23 nt, synthetic construct
  misc_feature 1..23: note = Description of sequence: ZPI siRNA antisense strand, modified; Strand ID: ETXS640; Based on: SEQ ID NO: 151
  source 1..23: mol_type = other RNA
  modified_base 1^2: mod_base = OTHER; note = phosphorothioate linkage
  modified_base 2^3: mod_base = OTHER; note = phosphorothioate linkage
  modified_base 21^22: mod_base = OTHER; note = phosphorothioate linkage
  modified_base 22^23: mod_base = OTHER; note = phosphorothioate linkage
  modified_base 1: mod_base = um
  modified_base 2: mod_base = OTHER; note = 2'Fluoro-adenosine
  modified_base 3: mod_base = cm
  modified_base 4: mod_base = OTHER; note = 2'Fluoro-cytidine
  modified_base 5: mod_base = cm
  modified_base 6: mod_base = OTHER; note = 2'Fluoro-adenosine
  modified_base 7: mod_base = OTHER; note = 2'O-methyl-adenosine
  modified_base 8: mod_base = OTHER; note = 2'O-methyl-adenosine
  modified_base 9: mod_base = OTHER; note = 2'O-methyl-adenosine
  modified_base 10: mod_base = um
  modified_base 11: mod_base = um
  modified_base 12: mod_base = cm
  modified_base 13: mod_base = cm
  modified_base 14: mod_base = OTHER; note = 2'Fluoro-uridine
  modified_base 15: mod_base = cm
  modified_base 16: mod_base = OTHER; note = 2'Fluoro-cytidine
  modified_base 17: mod_base = um
  modified_base 18: mod_base = gm
  modified_base 19: mod_base = OTHER; note = 2'O-methyl-adenosine
  modified_base 20: mod_base = OTHER; note = 2'O-methyl-adenosine
  modified_base 21: mod_base = gm
  modified_base 22: mod_base = OTHER; note = 2'O-methyl-adenosine
  modified_base 23: mod_base = gm
tacccaaaattcctcctgaagag

SEQ ID NO: 767 - RNA, 23 nt, synthetic construct
  misc_feature 1..23: note = Description of sequence: ZPI siRNA antisense strand, modified; Strand ID: ETXS642; Based on: SEQ ID NO: 151
  source 1..23: mol_type = other RNA
  modified_base 1^2: mod_base = OTHER; note = phosphorothioate linkage
  modified_base 2^3: mod_base = OTHER; note = phosphorothioate linkage
  modified_base 21^22: mod_base = OTHER; note = phosphorothioate linkage
  modified_base 22^23: mod_base = OTHER; note = phosphorothioate linkage
  modified_base 1: mod_base = um
  modified_base 2: mod_base = OTHER; note = 2'Fluoro-adenosine
  modified_base 3: mod_base = cm
  modified_base 4: mod_base = cm
  modified_base 5: mod_base = cm
  modified_base 6: mod_base = OTHER; note = 2'Fluoro-adenosine
  modified_base 7: mod_base = OTHER; note = 2'O-methyl-adenosine
  modified_base 8: mod_base = OTHER; note = 2'Fluoro-adenosine
  modified_base 9: mod_base = OTHER; note = 2'O-methyl-adenosine
  modified_base 10: mod_base = um
  modified_base 11: mod_base = um
  modified_base 12: mod_base = cm
  modified_base 13: mod_base = cm
  modified_base 14: mod_base = OTHER; note = 2'Fluoro-uridine
  modified_base 15: mod_base = cm
  modified_base 16: mod_base = OTHER; note = 2'Fluoro-cytidine
  modified_base 17: mod_base = um
  modified_base 18: mod_base = gm
  modified_base 19: mod_base = OTHER; note = 2'O-methyl-adenosine
  modified_base 20: mod_base = OTHER; note = 2'O-methyl-adenosine
  modified_base 21: mod_base = gm
  modified_base 22: mod_base = OTHER; note = 2'O-methyl-adenosine
  modified_base 23: mod_base = gm
tacccaaaattcctcctgaagag

SEQ ID NO: 768 - RNA, 23 nt, synthetic construct
  misc_feature 1..23: note = Description of sequence: ZPI siRNA antisense strand, modified; Strand ID: ETXS644; Based on: SEQ ID NO: 152
  source 1..23: mol_type = other RNA
  modified_base 1^2: mod_base = OTHER; note = phosphorothioate linkage
  modified_base 2^3: mod_base = OTHER; note = phosphorothioate linkage
  modified_base 21^22: mod_base = OTHER; note = phosphorothioate linkage
  modified_base 22^23: mod_base = OTHER; note = phosphorothioate linkage
  modified_base 1: mod_base = cm
  modified_base 2: mod_base = OTHER; note = 2'Fluoro-guanosine
  modified_base 3: mod_base = OTHER; note = 2'O-methyl-adenosine
  modified_base 4: mod_base = OTHER; note = 2'Fluoro-guanosine
  modified_base 5: mod_base = um
  modified_base 6: mod_base = OTHER; note = 2'Fluoro-uridine
  modified_base 7: mod_base = cm
  modified_base 8: mod_base = um
  modified_base 9: mod_base = gm
  modified_base 10: mod_base = um
  modified_base 11: mod_base = um
  modified_base 12: mod_base = um
  modified_base 13: mod_base = gm
  modified_base 14: mod_base = OTHER; note = 2'Fluoro-uridine
  modified_base 15: mod_base = cm
  modified_base 16: mod_base = OTHER; note = 2'Fluoro-adenosine
  modified_base 17: mod_base = um
  modified_base 18: mod_base = gm
  modified_base 19: mod_base = cm
  modified_base 20: mod_base = um
  modified_base 21: mod_base = um
  modified_base 22: mod_base = um
  modified_base 23: mod_base = um
cgagttctgtttgtcatgctttt

SEQ ID NO: 769 - RNA, 23 nt, synthetic construct
  misc_feature 1..23: note = Description of sequence: ZPI siRNA antisense strand, modified; Strand ID: ETXS646; Based on: SEQ ID NO: 152
  source 1..23: mol_type = other RNA
  modified_base 1^2: mod_base = OTHER; note = phosphorothioate linkage
  modified_base 2^3: mod_base = OTHER; note = phosphorothioate linkage
  modified_base 21^22: mod_base = OTHER; note = phosphorothioate linkage
  modified_base 22^23: mod_base = OTHER; note = phosphorothioate linkage
  modified_base 1: mod_base = cm
  modified_base 2: mod_base = OTHER; note = 2'Fluoro-guanosine
  modified_base 3: mod_base = OTHER; note = 2'O-methyl-adenosine
  modified_base 4: mod_base = gm
  modified_base 5: mod_base = um
  modified_base 6: mod_base = OTHER; note = 2'Fluoro-uridine
  modified_base 7: mod_base = cm
  modified_base 8: mod_base = OTHER; note = 2'Fluoro-uridine
  modified_base 9: mod_base = gm
  modified_base 10: mod_base = um
  modified_base 11: mod_base = um
  modified_base 12: mod_base = um
  modified_base 13: mod_base = gm
  modified_base 14: mod_base = OTHER; note = 2'Fluoro-uridine
  modified_base 15: mod_base = cm
  modified_base 16: mod_base = OTHER; note = 2'Fluoro-adenosine
  modified_base 17: mod_base = um
  modified_base 18: mod_base = gm
  modified_base 19: mod_base = cm
  modified_base 20: mod_base = um
  modified_base 21: mod_base = um
  modified_base 22: mod_base = um
  modified_base 23: mod_base = um
cgagttctgtttgtcatgctttt

SEQ ID NO: 770 - RNA, 23 nt, synthetic construct
  misc_feature 1..23: note = Description of sequence: ZPI siRNA antisense strand, modified; Strand ID: ETXS648; Based on: SEQ ID NO: 188
  source 1..23: mol_type = other RNA
  modified_base 1^2: mod_base = OTHER; note = phosphorothioate linkage
  modified_base 2^3: mod_base = OTHER; note = phosphorothioate linkage
  modified_base 21^22: mod_base = OTHER; note = phosphorothioate linkage
  modified_base 22^23: mod_base = OTHER; note = phosphorothioate linkage
  modified_base 1: mod_base = um
  modified_base 2: mod_base = OTHER; note = 2'Fluoro-uridine
  modified_base 3: mod_base = um
  modified_base 4: mod_base = OTHER; note = 2'Fluoro-guanosine
  modified_base 5: mod_base = OTHER; note = 2'O-methyl-adenosine
  modified_base 6: mod_base = OTHER; note = 2'Fluoro-adenosine
  modified_base 7: mod_base = gm
  modified_base 8: mod_base = um
  modified_base 9: mod_base = OTHER; note = 2'O-methyl-adenosine
  modified_base 10: mod_base = gm
  modified_base 11: mod_base = OTHER; note = 2'O-methyl-adenosine
  modified_base 12: mod_base = um
  modified_base 13: mod_base = gm
  modified_base 14: mod_base = OTHER; note = 2'Fluoro-cytidine
  modified_base 15: mod_base = OTHER; note = 2'O-methyl-adenosine
  modified_base 16: mod_base = OTHER; note = 2'Fluoro-guanosine
  modified_base 17: mod_base = um
  modified_base 18: mod_base = um
  modified_base 19: mod_base = gm
  modified_base 20: mod_base = OTHER; note = 2'O-methyl-adenosine
  modified_base 21: mod_base = gm
  modified_base 22: mod_base = OTHER; note = 2'O-methyl-adenosine
  modified_base 23: mod_base = OTHER; note = 2'O-methyl-adenosine
tttgaagtagatgcagttgagaa

SEQ ID NO: 771 - RNA, 23 nt, synthetic construct
  misc_feature 1..23: note = Description of sequence: ZPI siRNA antisense strand, modified; Strand ID: ETXS650; Based on: SEQ ID NO: 188
  source 1..23: mol_type = other RNA
  modified_base 1^2: mod_base = OTHER; note = phosphorothioate linkage
  modified_base 2^3: mod_base = OTHER; note = phosphorothioate linkage
  modified_base 21^22: mod_base = OTHER; note = phosphorothioate linkage
  modified_base 22^23: mod_base = OTHER; note = phosphorothioate linkage
  modified_base 1: mod_base = um
  modified_base 2: mod_base = OTHER; note = 2'Fluoro-uridine
  modified_base 3: mod_base = um
  modified_base 4: mod_base = gm
  modified_base 5: mod_base = OTHER; note = 2'O-methyl-adenosine
  modified_base 6: mod_base = OTHER; note = 2'Fluoro-adenosine
  modified_base 7: mod_base = gm
  modified_base 8: mod_base = OTHER; note = 2'Fluoro-uridine
  modified_base 9: mod_base = OTHER; note = 2'O-methyl-adenosine
  modified_base 10: mod_base = gm
  modified_base 11: mod_base = OTHER; note = 2'O-methyl-adenosine
  modified_base 12: mod_base = um
  modified_base 13: mod_base = gm
  modified_base 14: mod_base = OTHER; note = 2'Fluoro-cytidine
  modified_base 15: mod_base = OTHER; note = 2'O-methyl-adenosine
  modified_base 16: mod_base = OTHER; note = 2'Fluoro-guanosine
  modified_base 17: mod_base = um
  modified_base 18: mod_base = um
  modified_base 19: mod_base = gm
  modified_base 20: mod_base = OTHER; note = 2'O-methyl-adenosine
  modified_base 21: mod_base = gm
  modified_base 22: mod_base = OTHER; note = 2'O-methyl-adenosine
  modified_base 23: mod_base = OTHER; note = 2'O-methyl-adenosine
tttgaagtagatgcagttgagaa

SEQ ID NO: 772 - RNA, 21 nt, synthetic construct
  misc_feature 1..21: note = Description of sequence: ZPI siRNA sense strand, modified; Strand ID: ETXS631; Based on: SEQ ID NO: 256
  source 1..21: mol_type = other RNA
  modified_base 1^2: mod_base = OTHER; note = phosphorothioate linkage
  modified_base 2^3: mod_base = OTHER; note = phosphorothioate linkage
  modified_base 19^20: mod_base = OTHER; note = phosphorothioate linkage
  modified_base 20^21: mod_base = OTHER; note = phosphorothioate linkage
  modified_base <1: mod_base = OTHER; note = two abasic inverted nucleoside overhang
  modified_base 1: mod_base = cm
  modified_base 2: mod_base = OTHER; note = 2'O-methyl-adenosine
  modified_base 3: mod_base = OTHER; note = 2'O-methyl-adenosine
  modified_base 4: mod_base = cm
  modified_base 5: mod_base = cm
  modified_base 6: mod_base = OTHER; note = 2'O-methyl-adenosine
  modified_base 7: mod_base = OTHER; note = 2'Fluoro-cytidine
  modified_base 8: mod_base = OTHER; note = 2'O-methyl-adenosine
  modified_base 9: mod_base = OTHER; note = 2'Fluoro-adenosine
  modified_base 10: mod_base = OTHER; note = 2'Fluoro-cytidine
  modified_base 11: mod_base = OTHER; note = 2'Fluoro-uridine
  modified_base 12: mod_base = OTHER; note = 2'Fluoro-uridine
  modified_base 13: mod_base = cm
  modified_base 14: mod_base = cm
  modified_base 15: mod_base = gm
  modified_base 16: mod_base = gm
  modified_base 17: mod_base = cm
  modified_base 18: mod_base = um
  modified_base 19: mod_base = gm
  modified_base 20: mod_base = OTHER; note = 2'O-methyl-adenosine
  modified_base 21: mod_base = OTHER; note = 2'O-methyl-adenosine
caaccacaacttccggctgaa

SEQ ID NO: 773 - RNA, 21 nt, synthetic construct
  misc_feature 1..21: note = Description of sequence: ZPI siRNA sense strand, modified; Strand ID: ETXS633; Based on: SEQ ID NO: 256
  source 1..21: mol_type = other RNA
  modified_base 1^2: mod_base = OTHER; note = phosphorothioate linkage
  modified_base 2^3: mod_base = OTHER; note = phosphorothioate linkage
  modified_base 19^20: mod_base = OTHER; note = phosphorothioate linkage
  modified_base 20^21: mod_base = OTHER; note = phosphorothioate linkage
  modified_base <1: mod_base = OTHER; note = two abasic inverted nucleoside overhang
  modified_base 1: mod_base = cm
  modified_base 2: mod_base = OTHER; note = 2'O-methyl-adenosine
  modified_base 3: mod_base = OTHER; note = 2'O-methyl-adenosine
  modified_base 4: mod_base = cm
  modified_base 5: mod_base = cm
  modified_base 6: mod_base = OTHER; note = 2'O-methyl-adenosine
  modified_base 7: mod_base = cm
  modified_base 8: mod_base = OTHER; note = 2'O-methyl-adenosine
  modified_base 9: mod_base = OTHER; note = 2'Fluoro-adenosine
  modified_base 10: mod_base = OTHER; note = 2'Fluoro-cytidine
  modified_base 11: mod_base = OTHER; note = 2'Fluoro-uridine
  modified_base 12: mod_base = um
  modified_base 13: mod_base = cm
  modified_base 14: mod_base = cm
  modified_base 15: mod_base = gm
  modified_base 16: mod_base = gm
  modified_base 17: mod_base = cm
  modified_base 18: mod_base = um
  modified_base 19: mod_base = gm
  modified_base 20: mod_base = OTHER; note = 2'O-methyl-adenosine
  modified_base 21: mod_base = OTHER; note = 2'O-methyl-adenosine
caaccacaacttccggctgaa

SEQ ID NO: 774 - RNA, 21 nt, synthetic construct
  misc_feature 1..21: note = Description of sequence: ZPI siRNA sense strand, modified; Strand ID: ETXS635; Based on: SEQ ID NO: 260
  source 1..21: mol_type = other RNA
  modified_base 1^2: mod_base = OTHER; note = phosphorothioate linkage
  modified_base 2^3: mod_base = OTHER; note = phosphorothioate linkage
  modified_base 19^20: mod_base = OTHER; note = phosphorothioate linkage
  modified_base 20^21: mod_base = OTHER; note = phosphorothioate linkage
  modified_base <1: mod_base = OTHER; note = two abasic inverted nucleoside overhang
  modified_base 1: mod_base = OTHER; note = 2'O-methyl-adenosine
  modified_base 2: mod_base = OTHER; note = 2'O-methyl-adenosine
  modified_base 3: mod_base = OTHER; note = 2'O-methyl-adenosine
  modified_base 4: mod_base = OTHER; note = 2'O-methyl-adenosine
  modified_base 5: mod_base = OTHER; note = 2'O-methyl-adenosine
  modified_base 6: mod_base = gm
  modified_base 7: mod_base = OTHER; note = 2'Fluoro-cytidine
  modified_base 8: mod_base = OTHER; note = 2'O-methyl-adenosine
  modified_base 9: mod_base = OTHER; note = 2'Fluoro-uridine
  modified_base 10: mod_base = OTHER; note = 2'Fluoro-guanosine
  modified_base 11: mod_base = OTHER; note = 2'Fluoro-adenosine
  modified_base 12: mod_base = OTHER; note = 2'Fluoro-cytidine
  modified_base 13: mod_base = OTHER; note = 2'O-methyl-adenosine
  modified_base 14: mod_base = OTHER; note = 2'O-methyl-adenosine
  modified_base 15: mod_base = OTHER; note = 2'O-methyl-adenosine
  modified_base 16: mod_base = cm
  modified_base 17: mod_base = OTHER; note = 2'O-methyl-adenosine
  modified_base 18: mod_base = gm
  modified_base 19: mod_base = OTHER; note = 2'O-methyl-adenosine
  modified_base 20: mod_base = OTHER; note = 2'O-methyl-adenosine
  modified_base 21: mod_base = cm
aaaaagcatgacaaacagaac

SEQ ID NO: 775 - RNA, 21 nt, synthetic construct
  misc_feature 1..21: note = Description of sequence: ZPI siRNA sense strand, modified; Strand ID: ETXS637; Based on: SEQ ID NO: 260
  source 1..21: mol_type = other RNA
  modified_base 1^2: mod_base = OTHER; note = phosphorothioate linkage
  modified_base 2^3: mod_base = OTHER; note = phosphorothioate linkage
  modified_base 19^20: mod_base = OTHER; note = phosphorothioate linkage
  modified_base 20^21: mod_base = OTHER; note = phosphorothioate linkage
  modified_base <1: mod_base = OTHER; note = two abasic inverted nucleoside overhang
  modified_base 1: mod_base = OTHER; note = 2'O-methyl-adenosine
  modified_base 2: mod_base = OTHER; note = 2'O-methyl-adenosine
  modified_base 3: mod_base = OTHER; note = 2'O-methyl-adenosine
  modified_base 4: mod_base = OTHER; note = 2'O-methyl-adenosine
  modified_base 5: mod_base = OTHER; note = 2'O-methyl-adenosine
  modified_base 6: mod_base = gm
  modified_base 7: mod_base = cm
  modified_base 8: mod_base = OTHER; note = 2'O-methyl-adenosine
  modified_base 9: mod_base = OTHER; note = 2'Fluoro-uridine
  modified_base 10: mod_base = OTHER; note = 2'Fluoro-guanosine
  modified_base 11: mod_base = OTHER; note = 2'Fluoro-adenosine
  modified_base 12: mod_base = cm
  modified_base 13: mod_base = OTHER; note = 2'O-methyl-adenosine
  modified_base 14: mod_base = OTHER; note = 2'O-methyl-adenosine
  modified_base 15: mod_base = OTHER; note = 2'O-methyl-adenosine
  modified_base 16: mod_base = cm
  modified_base 17: mod_base = OTHER; note = 2'O-methyl-adenosine
  modified_base 18: mod_base = gm
  modified_base 19: mod_base = OTHER; note = 2'O-methyl-adenosine
  modified_base 20: mod_base = OTHER; note = 2'O-methyl-adenosine
  modified_base 21: mod_base = cm
aaaaagcatgacaaacagaac

SEQ ID NO: 776 - RNA, 21 nt, synthetic construct
  misc_feature 1..21: note = Description of sequence: ZPI siRNA sense strand, modified; Strand ID: ETXS639; Based on: SEQ ID NO: 271
  source 1..21: mol_type = other RNA
  modified_base 1^2: mod_base = OTHER; note = phosphorothioate linkage
  modified_base 2^3: mod_base = OTHER; note = phosphorothioate linkage
  modified_base 19^20: mod_base = OTHER; note = phosphorothioate linkage
  modified_base 20^21: mod_base = OTHER; note = phosphorothioate linkage
  modified_base <1: mod_base = OTHER; note = two abasic inverted nucleoside overhang
  modified_base 1: mod_base = cm
  modified_base 2: mod_base = um
  modified_base 3: mod_base = um
  modified_base 4: mod_base = cm
  modified_base 5: mod_base = OTHER; note = 2'O-methyl-adenosine
  modified_base 6: mod_base = gm
  modified_base 7: mod_base = OTHER; note = 2'Fluoro-guanosine
  modified_base 8: mod_base = OTHER; note = 2'O-methyl-adenosine
  modified_base 9: mod_base = OTHER; note = 2'Fluoro-guanosine
  modified_base 10: mod_base = OTHER; note = 2'Fluoro-guanosine
  modified_base 11: mod_base = OTHER; note = 2'Fluoro-adenosine
  modified_base 12: mod_base = OTHER; note = 2'Fluoro-adenosine
  modified_base 13: mod_base = um
  modified_base 14: mod_base = um
  modified_base 15: mod_base = um
  modified_base 16: mod_base = um
  modified_base 17: mod_base = gm
  modified_base 18: mod_base = gm
  modified_base 19: mod_base = gm
  modified_base 20: mod_base = um
  modified_base 21: mod_base = OTHER; note = 2'O-methyl-adenosine
cttcaggaggaattttgggta

SEQ ID NO: 777 - RNA, 21 nt, synthetic construct
  misc_feature 1..21: note = Description of sequence: ZPI siRNA sense strand, modified; Strand ID: ETXS641; Based on: SEQ ID NO: 271
  source 1..21: mol_type = other RNA
  modified_base 1^2: mod_base = OTHER; note = phosphorothioate linkage
  modified_base 2^3: mod_base = OTHER; note = phosphorothioate linkage
  modified_base 19^20: mod_base = OTHER; note = phosphorothioate linkage
  modified_base 20^21: mod_base = OTHER; note = phosphorothioate linkage
  modified_base <1: mod_base = OTHER; note = two abasic inverted nucleoside overhang
  modified_base 1: mod_base = cm
  modified_base 2: mod_base = um
  modified_base 3: mod_base = um
  modified_base 4: mod_base = cm
  modified_base 5: mod_base = OTHER; note = 2'O-methyl-adenosine
  modified_base 6: mod_base = gm
  modified_base 7: mod_base = gm
  modified_base 8: mod_base = OTHER; note = 2'O-methyl-adenosine
  modified_base 9: mod_base = OTHER; note = 2'Fluoro-guanosine
  modified_base 10: mod_base = OTHER; note = 2'Fluoro-guanosine
  modified_base 11: mod_base = OTHER; note = 2'Fluoro-adenosine
  modified_base 12: mod_base = OTHER; note = 2'O-methyl-adenosine
  modified_base 13: mod_base = um
  modified_base 14: mod_base = um
  modified_base 15: mod_base = um
  modified_base 16: mod_base = um
  modified_base 17: mod_base = gm
  modified_base 18: mod_base = gm
  modified_base 19: mod_base = gm
  modified_base 20: mod_base = um
  modified_base 21: mod_base = OTHER; note = 2'O-methyl-adenosine
cttcaggaggaattttgggta

SEQ ID NO: 778 - RNA, 21 nt, synthetic construct
  misc_feature 1..21: note = Description of sequence: ZPI siRNA sense strand, modified; Strand ID: ETXS643; Based on: SEQ ID NO: 272
  source 1..21: mol_type = other RNA
  modified_base 1^2: mod_base = OTHER; note = phosphorothioate linkage
  modified_base 2^3: mod_base = OTHER; note = phosphorothioate linkage
  modified_base 19^20: mod_base = OTHER; note = phosphorothioate linkage
  modified_base 20^21: mod_base = OTHER; note = phosphorothioate linkage
  modified_base <1: mod_base = OTHER; note = two abasic inverted nucleoside overhang
  modified_base 1: mod_base = OTHER; note = 2'O-methyl-adenosine
  modified_base 2: mod_base = OTHER; note = 2'O-methyl-adenosine
  modified_base 3: mod_base = gm
  modified_base 4: mod_base = cm
  modified_base 5: mod_base = OTHER; note = 2'O-methyl-adenosine
  modified_base 6: mod_base = um
  modified_base 7: mod_base = OTHER; note = 2'Fluoro-guanosine
  modified_base 8: mod_base = OTHER; note = 2'O-methyl-adenosine
  modified_base 9: mod_base = OTHER; note = 2'Fluoro-cytidine
  modified_base 10: mod_base = OTHER; note = 2'Fluoro-adenosine
  modified_base 11: mod_base = OTHER; note = 2'Fluoro-adenosine
  modified_base 12: mod_base = OTHER; note = 2'Fluoro-adenosine
  modified_base 13: mod_base = cm
  modified_base 14: mod_base = OTHER; note = 2'O-methyl-adenosine
  modified_base 15: mod_base = gm
  modified_base 16: mod_base = OTHER; note = 2'O-methyl-adenosine
  modified_base 17: mod_base = OTHER; note = 2'O-methyl-adenosine
  modified_base 18: mod_base = cm
  modified_base 19: mod_base = um
  modified_base 20: mod_base = cm
  modified_base 21: mod_base = gm
aagcatgacaaacagaactcg

SEQ ID NO: 779 - RNA, 21 nt, synthetic construct
  misc_feature 1..21: note = Description of sequence: ZPI siRNA sense strand, modified; Strand ID: ETXS645; Based on: SEQ ID NO: 272
  source 1..21: mol_type = other RNA
  modified_base 1^2: mod_base = OTHER; note = phosphorothioate linkage
  modified_base 2^3: mod_base = OTHER; note = phosphorothioate linkage
  modified_base 19^20: mod_base = OTHER; note = phosphorothioate linkage
  modified_base 20^21: mod_base = OTHER; note = phosphorothioate linkage
  modified_base <1: mod_base = OTHER; note = two abasic inverted nucleoside overhang
  modified_base 1: mod_base = OTHER; note = 2'O-methyl-adenosine
  modified_base 2: mod_base = OTHER; note = 2'O-methyl-adenosine
  modified_base 3: mod_base = gm
  modified_base 4: mod_base = cm
  modified_base 5: mod_base = OTHER; note = 2'O-methyl-adenosine
  modified_base 6: mod_base = um
  modified_base 7: mod_base = gm
  modified_base 8: mod_base = OTHER; note = 2'O-methyl-adenosine
  modified_base 9: mod_base = OTHER; note = 2'Fluoro-cytidine
  modified_base 10: mod_base = OTHER; note = 2'Fluoro-adenosine
  modified_base 11: mod_base = OTHER; note = 2'Fluoro-adenosine
  modified_base 12: mod_base = OTHER; note = 2'O-methyl-adenosine
  modified_base 13: mod_base = cm
  modified_base 14: mod_base = OTHER; note = 2'O-methyl-adenosine
  modified_base 15: mod_base = gm
  modified_base 16: mod_base = OTHER; note = 2'O-methyl-adenosine
  modified_base 17: mod_base = OTHER; note = 2'O-methyl-adenosine
  modified_base 18: mod_base = cm
  modified_base 19: mod_base = um
  modified_base 20: mod_base = cm
  modified_base 21: mod_base = gm
aagcatgacaaacagaactcg

SEQ ID NO: 780 - RNA, 21 nt, synthetic construct
  misc_feature 1..21: note = Description of sequence: ZPI siRNA sense strand, modified; Strand ID: ETXS647; Based on: SEQ ID NO: 308
  source 1..21: mol_type = other RNA
  modified_base 1^2: mod_base = OTHER; note = phosphorothioate linkage
  modified_base 2^3: mod_base = OTHER; note = phosphorothioate linkage
  modified_base 19^20: mod_base = OTHER; note = phosphorothioate linkage
  modified_base 20^21: mod_base = OTHER; note = phosphorothioate linkage
  modified_base <1: mod_base = OTHER; note = two abasic inverted nucleoside overhang
  modified_base 1: mod_base = cm
  modified_base 2: mod_base = um
  modified_base 3: mod_base = cm
  modified_base 4: mod_base = OTHER; note = 2'O-methyl-adenosine
  modified_base 5: mod_base = OTHER; note = 2'O-methyl-adenosine
  modified_base 6: mod_base = cm
  modified_base 7: mod_base = OTHER; note = 2'Fluoro-uridine
  modified_base 8: mod_base = gm
  modified_base 9: mod_base = OTHER; note = 2'Fluoro-cytidine
  modified_base 10: mod_base = OTHER; note = 2'Fluoro-adenosine
  modified_base 11: mod_base = OTHER; note = 2'Fluoro-uridine
  modified_base 12: mod_base = OTHER; note = 2'Fluoro-cytidine
  modified_base 13: mod_base = um
  modified_base 14: mod_base = OTHER; note = 2'O-methyl-adenosine
  modified_base 15: mod_base = cm
  modified_base 16: mod_base = um
  modified_base 17: mod_base = um
  modified_base 18: mod_base = cm
  modified_base 19: mod_base = OTHER; note = 2'O-methyl-adenosine
  modified_base 20: mod_base = OTHER; note = 2'O-methyl-adenosine
  modified_base 21: mod_base = OTHER; note = 2'O-methyl-adenosine
ctcaactgcatctacttcaaa

SEQ ID NO: 781 - RNA, 21 nt, synthetic construct
  misc_feature 1..21: note = Description of sequence: ZPI siRNA sense strand, modified; Strand ID: ETXS649; Based on: SEQ ID NO: 308
  source 1..21: mol_type = other RNA
  modified_base 1^2: mod_base = OTHER; note = phosphorothioate linkage
  modified_base 2^3: mod_base = OTHER; note = phosphorothioate linkage
  modified_base 19^20: mod_base = OTHER; note = phosphorothioate linkage
  modified_base 20^21: mod_base = OTHER; note = phosphorothioate linkage
  modified_base <1: mod_base = OTHER; note = two abasic inverted nucleoside overhang
  modified_base 1: mod_base = cm
  modified_base 2: mod_base = um
  modified_base 3: mod_base = cm
  modified_base 4: mod_base = OTHER; note = 2'O-methyl-adenosine
  modified_base 5: mod_base = OTHER; note = 2'O-methyl-adenosine
  modified_base 6: mod_base = cm
  modified_base 7: mod_base = um
  modified_base 8: mod_base = gm
  modified_base 9: mod_base = OTHER; note = 2'Fluoro-cytidine
  modified_base 10: mod_base = OTHER; note = 2'Fluoro-adenosine
  modified_base 11: mod_base = OTHER; note = 2'Fluoro-uridine
  modified_base 12: mod_base = cm
  modified_base 13: mod_base = um
  modified_base 14: mod_base = OTHER; note = 2'O-methyl-adenosine
  modified_base 15: mod_base = cm
  modified_base 16: mod_base = um
  modified_base 17: mod_base = um
  modified_base 18: mod_base = cm
  modified_base 19: mod_base = OTHER; note = 2'O-methyl-adenosine
  modified_base 20: mod_base = OTHER; note = 2'O-methyl-adenosine
  modified_base 21: mod_base = OTHER; note = 2'O-methyl-adenosine
ctcaactgcatctacttcaaa

SEQ ID NO: 782 - RNA, 23 nt, synthetic construct
  misc_feature 1..23: note = Description of sequence: ZPI siRNA sense strand, modified; Strand ID: ETXS652; Based on: SEQ ID NO: 136
  source 1..23: mol_type = other RNA
  modified_base 1^2: mod_base = OTHER; note = phosphorothioate linkage
  modified_base 2^3: mod_base = OTHER; note = phosphorothioate linkage
  modified_base 21^22: mod_base = OTHER; note = phosphorothioate linkage
  modified_base 22^23: mod_base = OTHER; note = phosphorothioate linkage
  modified_base 1: mod_base = um
  modified_base 2: mod_base = OTHER; note = 2'Fluoro-uridine
  modified_base 3: mod_base = cm
  modified_base 4: mod_base = OTHER; note = 2'O-methyl-adenosine
  modified_base 5: mod_base = gm
  modified_base 6: mod_base = OTHER; note = 2'Fluoro-cytidine
  modified_base 7: mod_base = cm
  modified_base 8: mod_base = gm
  modified_base 9: mod_base = gm
  modified_base 10: mod_base = OTHER; note = 2'O-methyl-adenosine
  modified_base 11: mod_base = OTHER; note = 2'O-methyl-adenosine
  modified_base 12: mod_base = gm
  modified_base 13: mod_base = um
  modified_base 14: mod_base = OTHER; note = 2'Fluoro-uridine
  modified_base 15: mod_base = gm
  modified_base 16: mod_base = OTHER; note = 2'Fluoro-uridine
  modified_base 17: mod_base = gm
  modified_base 18: mod_base = OTHER; note = 2'Fluoro-guanosine
  modified_base 19: mod_base = um
  modified_base 20: mod_base = um
  modified_base 21: mod_base = gm
  modified_base 22: mod_base = um
  modified_base 23: mod_base = gm
ttcagccggaagttgtggttgtg

SEQ ID NO: 783 - RNA, 23 nt, synthetic construct
  misc_feature 1..23: note = Description of sequence: ZPI siRNA antisense strand, modified; Strand ID: ETXS654; Based on: SEQ ID NO: 140
  source 1..23: mol_type = other RNA
  modified_base 1^2: mod_base = OTHER; note = phosphorothioate linkage
  modified_base 2^3: mod_base = OTHER; note = phosphorothioate linkage
  modified_base 21^22: mod_base = OTHER; note = phosphorothioate linkage
  modified_base 22^23: mod_base = OTHER; note = phosphorothioate linkage
  modified_base 1: mod_base = gm
  modified_base 2: mod_base = OTHER; note = 2'Fluoro-uridine
  modified_base 3: mod_base = um
  modified_base 4: mod_base = cm
  modified_base 5: mod_base = um
  modified_base 6: mod_base = OTHER; note = 2'Fluoro-guanosine
  modified_base 7: mod_base = um
  modified_base 8: mod_base = um
  modified_base 9: mod_base = um
  modified_base 10: mod_base = gm
  modified_base 11: mod_base = um
  modified_base 12: mod_base = cm
  modified_base 13: mod_base = OTHER; note = 2'O-methyl-adenosine
  modified_base 14: mod_base = OTHER; note = 2'Fluoro-uridine
  modified_base 15: mod_base = gm
  modified_base 16: mod_base = OTHER; note = 2'Fluoro-cytidine
  modified_base 17: mod_base = um
  modified_base 18: mod_base = OTHER; note = 2'Fluoro-uridine
  modified_base 19: mod_base = um
  modified_base 20: mod_base = um
  modified_base 21: mod_base = um
  modified_base 22: mod_base = um
  modified_base 23: mod_base = gm
gttctgtttgtcatgcttttttg

SEQ ID NO: 784 - RNA, 23 nt, synthetic construct
  misc_feature 1..23: note = Description of sequence: ZPI siRNA antisense strand, modified; Strand ID: ETXS656; Based on: SEQ ID NO: 151
  source 1..23: mol_type = other RNA
  modified_base 1^2: mod_base = OTHER; note = phosphorothioate linkage
  modified_base 2^3: mod_base = OTHER; note = phosphorothioate linkage
  modified_base 21^22: mod_base = OTHER; note = phosphorothioate linkage
  modified_base 22^23: mod_base = OTHER; note = phosphorothioate linkage
  modified_base 1: mod_base = um
  modified_base 2: mod_base = OTHER; note = 2'Fluoro-adenosine
  modified_base 3: mod_base = cm
  modified_base 4: mod_base = cm
  modified_base 5: mod_base = cm
  modified_base 6: mod_base = OTHER; note = 2'Fluoro-adenosine
  modified_base 7: mod_base = OTHER; note = 2'O-methyl-adenosine
  modified_base 8: mod_base = OTHER; note = 2'O-methyl-adenosine
  modified_base 9: mod_base = OTHER; note = 2'O-methyl-adenosine
  modified_base 10: mod_base = um
  modified_base 11: mod_base = um
  modified_base 12: mod_base = cm
  modified_base 13: mod_base = cm
  modified_base 14: mod_base = OTHER; note = 2'Fluoro-uridine
  modified_base 15: mod_base = cm
  modified_base 16: mod_base = OTHER; note = 2'Fluoro-cytidine
  modified_base 17: mod_base = um
  modified_base 18: mod_base = OTHER; note = 2'Fluoro-guanosine
  modified_base 19: mod_base = OTHER; note = 2'O-methyl-adenosine
  modified_base 20: mod_base = OTHER; note = 2'O-methyl-adenosine
  modified_base 21: mod_base = gm
  modified_base 22: mod_base = OTHER; note = 2'O-methyl-adenosine
  modified_base 23: mod_base = gm
tacccaaaattcctcctgaagag

SEQ ID NO: 785 - RNA, 23 nt, synthetic construct
  misc_feature 1..23: note = Description of sequence: ZPI siRNA antisense strand, modified; Strand ID: ETXS658; Based on: SEQ ID NO: 152
  source 1..23: mol_type = other RNA
  modified_base 1^2: mod_base = OTHER; note = phosphorothioate linkage
  modified_base 2^3: mod_base = OTHER; note = phosphorothioate linkage
  modified_base 21^22: mod_base = OTHER; note = phosphorothioate linkage
  modified_base 22^23: mod_base = OTHER; note = phosphorothioate linkage
  modified_base 1: mod_base = cm
  modified_base 2: mod_base = OTHER; note = 2'Fluoro-guanosine
  modified_base 3: mod_base = OTHER; note = 2'O-methyl-adenosine
  modified_base 4: mod_base = gm
  modified_base 5: mod_base = um
  modified_base 6: mod_base = OTHER; note = 2'Fluoro-uridine
  modified_base 7: mod_base = cm
  modified_base 8: mod_base = um
  modified_base 9: mod_base = gm
  modified_base 10: mod_base = um
  modified_base 11: mod_base = um
  modified_base 12: mod_base = um
  modified_base 13: mod_base = gm
  modified_base 14: mod_base = OTHER; note = 2'Fluoro-uridine
  modified_base 15: mod_base = cm
  modified_base 16: mod_base = OTHER; note = 2'Fluoro-adenosine
  modified_base 17: mod_base = um
  modified_base 18: mod_base = OTHER; note = 2'Fluoro-guanosine
  modified_base 19: mod_base = cm
  modified_base 20: mod_base = um
  modified_base 21: mod_base = um
  modified_base 22: mod_base = um
  modified_base 23: mod_base = um
cgagttctgtttgtcatgctttt

SEQ ID NO: 786 - RNA, 23 nt, synthetic construct
  misc_feature 1..23: note = Description of sequence: ZPI siRNA antisense strand, modified; Strand ID: ETXS660; Based on: SEQ ID NO: 188
  source 1..23: mol_type = other RNA
  modified_base 1^2: mod_base = OTHER; note = phosphorothioate linkage
  modified_base 2^3: mod_base = OTHER; note = phosphorothioate linkage
  modified_base 21^22: mod_base = OTHER; note = phosphorothioate linkage
  modified_base 22^23: mod_base = OTHER; note = phosphorothioate linkage
  modified_base 1: mod_base = um
  modified_base 2: mod_base = OTHER; note = 2'Fluoro-uridine
  modified_base 3: mod_base = um
  modified_base 4: mod_base = gm
  modified_base 5: mod_base = OTHER; note = 2'O-methyl-adenosine
  modified_base 6: mod_base = OTHER; note = 2'Fluoro-adenosine
  modified_base 7: mod_base = gm
  modified_base 8: mod_base = um
  modified_base 9: mod_base = OTHER; note = 2'O-methyl-adenosine
  modified_base 10: mod_base = gm
  modified_base 11: mod_base = OTHER; note = 2'O-methyl-adenosine
  modified_base 12: mod_base = um
  modified_base 13: mod_base = gm
  modified_base 14: mod_base = OTHER; note = 2'Fluoro-cytidine
  modified_base 15: mod_base = OTHER; note = 2'O-methyl-adenosine
  modified_base 16: mod_base = OTHER; note = 2'Fluoro-guanosine
  modified_base 17: mod_base = um
  modified_base 18: mod_base = OTHER; note = 2'Fluoro-uridine
  modified_base 19: mod_base = gm
  modified_base 20: mod_base = OTHER; note = 2'O-methyl-adenosine
  modified_base 21: mod_base = gm
  modified_base 22: mod_base = OTHER; note = 2'O-methyl-adenosine
  modified_base 23: mod_base = OTHER; note = 2'O-methyl-adenosine
tttgaagtagatgcagttgagaa

SEQ ID NO: 787 - DNA, 21 bp, synthetic construct
  misc_feature 1..21: note = Description of sequence: Comparator sequences, containing u modifications
  source 1..21: mol_type = other DNA
  modified_base 4: mod_base = OTHER; note = uracil
  modified_base 11: mod_base = OTHER; note = uracil
  modified_base 12: mod_base = OTHER; note = uracil
acgtgacacgttcggagaatt

SEQ ID NO: 788 - DNA, 21 bp, synthetic construct
  misc_feature 1..21: note = Description of sequence: Comparator sequences, containing u modifications
  source 1..21: mol_type = other DNA
  modified_base 1: mod_base = OTHER; note = uracil
  modified_base 2: mod_base = OTHER; note = uracil
  modified_base 4: mod_base = OTHER; note = uracil
  modified_base 12: mod_base = OTHER; note = uracil
  modified_base 14: mod_base = OTHER; note = uracil
  modified_base 19: mod_base = OTHER; note = uracil
ttctccgaacgtgtcacgttt

SEQ ID NO: 789 - RNA, 23 nt, synthetic construct
  misc_feature 1..23: note = Description of sequence: HCII siRNA antisense strand, modified; Strand ID: ETXS2434; Based on: SEQ ID NO: 140
  source 1..23: mol_type = other RNA
  modified_base 1^2: mod_base = OTHER; note = phosphorothioate linkage
  modified_base 2^3: mod_base = OTHER; note = phosphorothioate linkage
  modified_base 21^22: mod_base = OTHER; note = phosphorothioate linkage
  modified_base 22^23: mod_base = OTHER; note = phosphorothioate linkage
  modified_base 1: mod_base = gm
  modified_base 2: mod_base = OTHER; note = 2'Fluoro-uridine
  modified_base 3: mod_base = um
  modified_base 4: mod_base = cm
  modified_base 5: mod_base = um
  modified_base 6: mod_base = OTHER; note = 2'Fluoro-guanosine
  modified_base 7: mod_base = um
  modified_base 8: mod_base = um
  modified_base 9: mod_base = OTHER; note = 2'Fluoro-uridine
  modified_base 10: mod_base = gm
  modified_base 11: mod_base = um
  modified_base 12: mod_base = cm
  modified_base 13: mod_base = OTHER; note = 2'O-methyl-adenosine
  modified_base 14: mod_base = OTHER; note = 2'Fluoro-uridine
  modified_base 15: mod_base = gm
  modified_base 16: mod_base = OTHER; note = 2'Fluoro-cytidine
  modified_base 17: mod_base = um
  modified_base 18: mod_base = um
  modified_base 19: mod_base = um
  modified_base 20: mod_base = um
  modified_base 21: mod_base = um
  modified_base 22: mod_base = um
  modified_base 23: mod_base = gm
gttctgtttgtcatgcttttttg

SEQ ID NO: 790 - RNA, 23 nt, synthetic construct
  misc_feature 1..23: note = Description of sequence: HCII siRNA antisense strand, modified; Strand ID: ETSX2436; Based on: SEQ ID NO: 140
  source 1..23: mol_type = other RNA
  modified_base 1^2: mod_base = OTHER; note = phosphorothioate linkage
  modified_base 2^3: mod_base = OTHER; note = phosphorothioate linkage
  modified_base 21^22: mod_base = OTHER; note = phosphorothioate linkage
  modified_base 22^23: mod_base = OTHER; note = phosphorothioate linkage
  modified_base 1: mod_base = gm
  modified_base 2: mod_base = OTHER; note = 2'Fluoro-uridine
  modified_base 3: mod_base = um
  modified_base 4: mod_base = cm
  modified_base 5: mod_base = um
  modified_base 6: mod_base = OTHER; note = 2'Fluoro-guanosine
  modified_base 7: mod_base = um
  modified_base 8: mod_base = um
  modified_base 9: mod_base = um
  modified_base 10: mod_base = gm
  modified_base 11: mod_base = um
  modified_base 12: mod_base = cm
  modified_base 13: mod_base = OTHER; note = 2'O-methyl-adenosine
  modified_base 14: mod_base = OTHER; note = 2'Fluoro-uridine
  modified_base 15: mod_base = gm
  modified_base 16: mod_base = OTHER; note = 2'Fluoro-cytidine
  modified_base 17: mod_base = um
  modified_base 18: mod_base = OTHER; note = 2'Fluoro-uridine
  modified_base 19: mod_base = um
  modified_base 20: mod_base = um
  modified_base 21: mod_base = um
  modified_base 22: mod_base = um
  modified_base 23: mod_base = gm
gttctgtttgtcatgcttttttg

SEQ ID NO: 791 - RNA, 23 nt, synthetic construct
  misc_feature 1..23: note = Description of sequence: HCII siRNA antisense strand, modified; Strand ID: ETXS2438; Based on: SEQ ID NO: 140
  source 1..23: mol_type = other RNA
  modified_base 1^2: mod_base = OTHER; note = phosphorothioate linkage
  modified_base 2^3: mod_base = OTHER; note = phosphorothioate linkage
  modified_base 21^22: mod_base = OTHER; note = phosphorothioate linkage
  modified_base 22^23: mod_base = OTHER; note = phosphorothioate linkage
  modified_base 1: mod_base = gm
  modified_base 2: mod_base = OTHER; note = 2'Fluoro-uridine
  modified_base 3: mod_base = um
  modified_base 4: mod_base = cm
  modified_base 5: mod_base = um
  modified_base 6: mod_base = OTHER; note = thermally destabilized analogue of guanosine
  modified_base 7: mod_base = um
  modified_base 8: mod_base = um
  modified_base 9: mod_base = um
  modified_base 10: mod_base = gm
  modified_base 11: mod_base = um
  modified_base 12: mod_base = cm
  modified_base 13: mod_base = OTHER; note = 2'O-methyl-adenosine
  modified_base 14: mod_base = OTHER; note = 2'Fluoro-uridine
  modified_base 15: mod_base = gm
  modified_base 16: mod_base = OTHER; note = 2'Fluoro-cytidine
  modified_base 17: mod_base = um
  modified_base 18: mod_base = um
  modified_base 19: mod_base = um
  modified_base 20: mod_base = um
  modified_base 21: mod_base = um
  modified_base 22: mod_base = um
  modified_base 23: mod_base = gm
gttctgtttgtcatgcttttttg

SEQ ID NO: 792 - RNA, 23 nt, synthetic construct
  misc_feature 1..23: note = Description of sequence: HCII siRNA antisense strand, modified; Strand ID: ETXS2440; Based on: SEQ ID NO: 140
  source 1..23: mol_type = other RNA
  modified_base 1^2: mod_base = OTHER; note = phosphorothioate linkage
  modified_base 2^3: mod_base = OTHER; note = phosphorothioate linkage
  modified_base 21^22: mod_base = OTHER; note = phosphorothioate linkage
  modified_base 22^23: mod_base = OTHER; note = phosphorothioate linkage
  modified_base 1: mod_base = gm
  modified_base 2: mod_base = OTHER; note = 2'Fluoro-uridine
  modified_base 3: mod_base = um
  modified_base 4: mod_base = cm
  modified_base 5: mod_base = um
  modified_base 6: mod_base = OTHER; note = thermally destabilized analogue of guanosine
  modified_base 7: mod_base = um
  modified_base 8: mod_base = OTHER; note = 2'Fluoro-uridine
  modified_base 9: mod_base = OTHER; note = 2'Fluoro-uridine
  modified_base 10: mod_base = gm
  modified_base 11: mod_base = um
  modified_base 12: mod_base = cm
  modified_base 13: mod_base = OTHER; note = 2'O-methyl-adenosine
  modified_base 14: mod_base = OTHER; note = 2'Fluoro-uridine
  modified_base 15: mod_base = gm
  modified_base 16: mod_base = OTHER; note = 2'Fluoro-cytidine
  modified_base 17: mod_base = um
  modified_base 18: mod_base = um
  modified_base 19: mod_base = um
  modified_base 20: mod_base = um
  modified_base 21: mod_base = um
  modified_base 22: mod_base = um
  modified_base 23: mod_base = gm
gttctgtttgtcatgcttttttg

SEQ ID NO: 793 - RNA, 23 nt, synthetic construct
  misc_feature 1..23: note = Description of sequence: HCII siRNA antisense strand, modified; Strand ID: ETXS2442; Based on: SEQ ID NO: 140
  source 1..23: mol_type = other RNA
  modified_base 1^2: mod_base = OTHER; note = phosphorothioate linkage
  modified_base 2^3: mod_base = OTHER; note = phosphorothioate linkage
  modified_base 21^22: mod_base = OTHER; note = phosphorothioate linkage
  modified_base 22^23: mod_base = OTHER; note = phosphorothioate linkage
  modified_base 1: mod_base = gm
  modified_base 2: mod_base = OTHER; note = 2'Fluoro-uridine
  modified_base 3: mod_base = um
  modified_base 4: mod_base = cm
  modified_base 5: mod_base = um
  modified_base 6: mod_base = OTHER; note = 2'Fluoro-guanosine
  modified_base 7: mod_base = um
  modified_base 8: mod_base = um
  modified_base 9: mod_base = um
  modified_base 10: mod_base = gm
  modified_base 11: mod_base = um
  modified_base 12: mod_base = cm
  modified_base 13: mod_base = OTHER; note = 2'O-methyl-adenosine
  modified_base 14: mod_base = OTHER; note = 2'Fluoro-uridine
  modified_base 15: mod_base = gm
  modified_base 16: mod_base = OTHER; note = 2'Fluoro-cytidine
  modified_base 17: mod_base = um
  modified_base 18: mod_base = um
  modified_base 19: mod_base = um
  modified_base 20: mod_base = OTHER; note = 2'Fluoro-uridine
  modified_base 21: mod_base = um
  modified_base 22: mod_base = um
  modified_base 23: mod_base = gm
gttctgtttgtcatgcttttttg

SEQ ID NO: 794 - RNA, 23 nt, synthetic construct
  misc_feature 1..23: note = Description of sequence: HCII siRNA antisense strand, modified; Strand ID: ETXS2444; Based on: SEQ ID NO: 140
  source 1..23: mol_type = other RNA
  modified_base 1^2: mod_base = OTHER; note = phosphorothioate linkage
  modified_base 2^3: mod_base = OTHER; note = phosphorothioate linkage
  modified_base 21^22: mod_base = OTHER; note = phosphorothioate linkage
  modified_base 22^23: mod_base = OTHER; note = phosphorothioate linkage
  modified_base 1: mod_base = gm
  modified_base 2: mod_base = OTHER; note = 2'Fluoro-uridine
  modified_base 3: mod_base = um
  modified_base 4: mod_base = OTHER; note = 2'Fluoro-cytidine
  modified_base 5: mod_base = um
  modified_base 6: mod_base = OTHER; note = 2'Fluoro-guanosine
  modified_base 7: mod_base = um
  modified_base 8: mod_base = um
  modified_base 9: mod_base = um
  modified_base 10: mod_base = gm
  modified_base 11: mod_base = um
  modified_base 12: mod_base = cm
  modified_base 13: mod_base = OTHER; note = 2'O-methyl-adenosine
  modified_base 14: mod_base = OTHER; note = 2'Fluoro-uridine
  modified_base 15: mod_base = gm
  modified_base 16: mod_base = OTHER; note = 2'Fluoro-cytidine
  modified_base 17: mod_base = um
  modified_base 18: mod_base = um
  modified_base 19: mod_base = um
  modified_base 20: mod_base = um
  modified_base 21: mod_base = um
  modified_base 22: mod_base = um
  modified_base 23: mod_base = gm
gttctgtttgtcatgcttttttg

SEQ ID NO: 795 - RNA, 23 nt, synthetic construct
  misc_feature 1..23: note = Description of sequence: HCII siRNA antisense strand, modified; Strand ID: ETXS2446; Based on: SEQ ID NO: 140
  source 1..23: mol_type = other RNA
  modified_base 1^2: mod_base = OTHER; note = phosphorothioate linkage
  modified_base 2^3: mod_base = OTHER; note = phosphorothioate linkage
  modified_base 21^22: mod_base = OTHER; note = phosphorothioate linkage
  modified_base 22^23: mod_base = OTHER; note = phosphorothioate linkage
  modified_base 1: mod_base = gm
  modified_base 2: mod_base = OTHER; note = 2'Fluoro-uridine
  modified_base 3: mod_base = um
  modified_base 4: mod_base = OTHER; note = 2'Fluoro-cytidine
  modified_base 5: mod_base = um
  modified_base 6: mod_base = OTHER; note = 2'Fluoro-guanosine
  modified_base 7: mod_base = um
  modified_base 8: mod_base = OTHER; note = 2'Fluoro-uridine
  modified_base 9: mod_base = OTHER; note = 2'Fluoro-uridine
  modified_base 10: mod_base = gm
  modified_base 11: mod_base = um
  modified_base 12: mod_base = cm
  modified_base 13: mod_base = OTHER; note = 2'O-methyl-adenosine
  modified_base 14: mod_base = OTHER; note = 2'Fluoro-uridine
  modified_base 15: mod_base = gm
  modified_base 16: mod_base = OTHER; note = 2'Fluoro-cytidine
  modified_base 17: mod_base = um
  modified_base 18: mod_base = um
  modified_base 19: mod_base = um
  modified_base 20: mod_base = um
  modified_base 21: mod_base = um
  modified_base 22: mod_base = um
  modified_base 23: mod_base = gm
gttctgtttgtcatgcttttttg

SEQ ID NO: 796 - RNA, 23 nt, synthetic construct
  misc_feature 1..23: note = Description of sequence: HCII siRNA antisense strand, modified; Strand ID: ETXS2448; Based on: SEQ ID NO: 140
  source 1..23: mol_type = other RNA
  modified_base 1^2: mod_base = OTHER; note = phosphorothioate linkage
  modified_base 2^3: mod_base = OTHER; note = phosphorothioate linkage
  modified_base 21^22: mod_base = OTHER; note = phosphorothioate linkage
  modified_base 22^23: mod_base = OTHER; note = phosphorothioate linkage
  modified_base 1: mod_base = gm
  modified_base 2: mod_base = OTHER; note = 2'Fluoro-uridine
  modified_base 3: mod_base = um
  modified_base 4: mod_base = cm
  modified_base 5: mod_base = um
  modified_base 6: mod_base = OTHER; note = 2'Fluoro-guanosine
  modified_base 7: mod_base = um
  modified_base 8: mod_base = OTHER; note = 2'Fluoro-uridine
  modified_base 9: mod_base = OTHER; note = 2'Fluoro-uridine
  modified_base 10: mod_base = gm
  modified_base 11: mod_base = um
  modified_base 12: mod_base = cm
  modified_base 13: mod_base = OTHER; note = 2'O-methyl-adenosine
  modified_base 14: mod_base = OTHER; note = 2'Fluoro-uridine
  modified_base 15: mod_base = gm
  modified_base 16: mod_base = OTHER; note = 2'Fluoro-cytidine
  modified_base 17: mod_base = um
  modified_base 18: mod_base = OTHER; note = 2'Fluoro-uridine
  modified_base 19: mod_base = um
  modified_base 20: mod_base = um
  modified_base 21: mod_base = um
  modified_base 22: mod_base = um
  modified_base 23: mod_base = gm
gttctgtttgtcatgcttttttg

SEQ ID NO: 797 - RNA, 23 nt, synthetic construct
  misc_feature 1..23: note = Description of sequence: HCII siRNA antisense strand, modified; Strand ID: ETXS2450; Based on: SEQ ID NO: 140
  source 1..23: mol_type = other RNA
  modified_base 1^2: mod_base = OTHER; note = phosphorothioate linkage
  modified_base 2^3: mod_base = OTHER; note = phosphorothioate linkage
  modified_base 21^22: mod_base = OTHER; note = phosphorothioate linkage
  modified_base 22^23: mod_base = OTHER; note = phosphorothioate linkage
  modified_base 1: mod_base = gm
  modified_base 2: mod_base = OTHER; note = 2'Fluoro-uridine
  modified_base 3: mod_base = um
  modified_base 4: mod_base = cm
  modified_base 5: mod_base = um
  modified_base 6: mod_base = OTHER; note = 2'Fluoro-guanosine
  modified_base 7: mod_base = um
  modified_base 8: mod_base = OTHER; note = 2'Fluoro-uridine
  modified_base 9: mod_base = OTHER; note = 2'Fluoro-uridine
  modified_base 10: mod_base = gm
  modified_base 11: mod_base = um
  modified_base 12: mod_base = cm
  modified_base 13: mod_base = OTHER; note = 2'O-methyl-adenosine
  modified_base 14: mod_base = OTHER; note = 2'Fluoro-uridine
  modified_base 15: mod_base = gm
  modified_base 16: mod_base = OTHER; note = 2'Fluoro-cytidine
  modified_base 17: mod_base = um
  modified_base 18: mod_base = um
  modified_base 19: mod_base = um
  modified_base 20: mod_base = OTHER; note = 2'Fluoro-uridine
  modified_base 21: mod_base = um
  modified_base 22: mod_base = um
  modified_base 23: mod_base = gm
gttctgtttgtcatgcttttttg

SEQ ID NO: 798 - RNA, 23 nt, synthetic construct
  misc_feature 1..23: note = Description of sequence: HCII siRNA antisense strand, modified; Strand ID: ETXS2452; Based on: SEQ ID NO: 152
  source 1..23: mol_type = other RNA
  modified_base 1^2: mod_base = OTHER; note = phosphorothioate linkage
  modified_base 2^3: mod_base = OTHER; note = phosphorothioate linkage
  modified_base 21^22: mod_base = OTHER; note = phosphorothioate linkage
  modified_base 22^23: mod_base = OTHER; note = phosphorothioate linkage
  modified_base 1: mod_base = cm
  modified_base 2: mod_base = OTHER; note = 2'Fluoro-guanosine
  modified_base 3: mod_base = OTHER; note = 2'O-methyl-adenosine
  modified_base 4: mod_base = gm
  modified_base 5: mod_base = um
  modified_base 6: mod_base = OTHER; note = 2'Fluoro-uridine
  modified_base 7: mod_base = cm
  modified_base 8: mod_base = um
  modified_base 9: mod_base = OTHER; note = 2'Fluoro-guanosine
  modified_base 10: mod_base = um
  modified_base 11: mod_base = um
  modified_base 12: mod_base = um
  modified_base 13: mod_base = gm
  modified_base 14: mod_base = OTHER; note = 2'Fluoro-uridine
  modified_base 15: mod_base = cm
  modified_base 16: mod_base = OTHER; note = 2'Fluoro-adenosine
  modified_base 17: mod_base = um
  modified_base 18: mod_base = gm
  modified_base 19: mod_base = cm
  modified_base 20: mod_base = um
  modified_base 21: mod_base = um
  modified_base 22: mod_base = um
  modified_base 23: mod_base = um
cgagttctgtttgtcatgctttt

SEQ ID NO: 799 - RNA, 23 nt, synthetic construct
  misc_feature 1..23: note = Description of sequence: HCII siRNA antisense strand, modified; Strand ID: ETXS2454; Based on: SEQ ID NO: 152
  source 1..23: mol_type = other RNA
  modified_base 1: mod_base = cm
  modified_base 2: mod_base = OTHER; note = 2'Fluoro-guanosine
  modified_base 3: mod_base = OTHER; note = 2'O-methyl-adenosine
  modified_base 4: mod_base = gm
  modified_base 5: mod_base = um
  modified_base 6: mod_base = OTHER; note = 2'Fluoro-uridine
  modified_base 7: mod_base = cm
  modified_base 8: mod_base = um
  modified_base 9: mod_base = gm
  modified_base 10: mod_base = um
  modified_base 11: mod_base = um
  modified_base 12: mod_base = um
  modified_base 13: mod_base = gm
  modified_base 14: mod_base = OTHER; note = 2'Fluoro-uridine
  modified_base 15: mod_base = cm
  modified_base 16: mod_base = OTHER; note = 2'Fluoro-adenosine
  modified_base 17: mod_base = um
  modified_base 18: mod_base = OTHER; note = 2'Fluoro-guanosine
  modified_base 19: mod_base = cm
  modified_base 20: mod_base = um
  modified_base 21: mod_base = um
  modified_base 22: mod_base = um
  modified_base 23: mod_base = um
cgagttctgtttgtcatgctttt

SEQ ID NO: 800 - RNA, 23 nt, synthetic construct
  misc_feature 1..23: note = Description of sequence: HCII siRNA antisense strand, modified; Strand ID: ETXS2456; Based on: SEQ ID NO: 152
  source 1..23: mol_type = other RNA
  modified_base 1: mod_base = cm
  modified_base 2: mod_base = OTHER; note = 2'Fluoro-guanosine
  modified_base 3: mod_base = OTHER; note = 2'O-methyl-adenosine
  modified_base 4: mod_base = gm
  modified_base 5: mod_base = um
  modified_base 6: mod_base = OTHER; note = thermally destabilized analogue of uridine
  modified_base 7: mod_base = cm
  modified_base 8: mod_base = um
  modified_base 9: mod_base = gm
  modified_base 10: mod_base = um
  modified_base 11: mod_base = um
  modified_base 12: mod_base = um
  modified_base 13: mod_base = gm
  modified_base 14: mod_base = OTHER; note = 2'Fluoro-uridine
  modified_base 15: mod_base = cm
  modified_base 16: mod_base = OTHER; note = 2'Fluoro-adenosine
  modified_base 17: mod_base = um
  modified_base 18: mod_base = gm
  modified_base 19: mod_base = cm
  modified_base 20: mod_base = um
  modified_base 21: mod_base = um
  modified_base 22: mod_base = um
  modified_base 23: mod_base = um
cgagttctgtttgtcatgctttt

SEQ ID NO: 801 - RNA, 23 nt, synthetic construct
  misc_feature 1..23: note = Description of sequence: HCII siRNA antisense strand, modified; Strand ID: ETXS2458; Based on: SEQ ID NO: 152
  source 1..23: mol_type = other RNA
  modified_base 1^2: mod_base = OTHER; note = phosphorothioate linkage
  modified_base 2^3: mod_base = OTHER; note = phosphorothioate linkage
  modified_base 21^22: mod_base = OTHER; note = phosphorothioate linkage
  modified_base 22^23: mod_base = OTHER; note = phosphorothioate linkage
  modified_base 1: mod_base = cm
  modified_base 2: mod_base = OTHER; note = 2'Fluoro-guanosine
  modified_base 3: mod_base = OTHER; note = 2'O-methyl-adenosine
  modified_base 4: mod_base = gm
  modified_base 5: mod_base = um
  modified_base 6: mod_base = OTHER; note = thermally destabilized analogue of uridine
  modified_base 7: mod_base = cm
  modified_base 8: mod_base = OTHER; note = 2'Fluoro-uridine
  modified_base 9: mod_base = OTHER; note = 2'Fluoro-guanosine
  modified_base 10: mod_base = um
  modified_base 11: mod_base = um
  modified_base 12: mod_base = um
  modified_base 13: mod_base = gm
  modified_base 14: mod_base = OTHER; note = 2'Fluoro-uridine
  modified_base 15: mod_base = cm
  modified_base 16: mod_base = OTHER; note = 2'Fluoro-adenosine
  modified_base 17: mod_base = um
  modified_base 18: mod_base = gm
  modified_base 19: mod_base = cm
  modified_base 20: mod_base = um
  modified_base 21: mod_base = um
  modified_base 22: mod_base = um
  modified_base 23: mod_base = um
cgagttctgtttgtcatgctttt

SEQ ID NO: 802 - RNA, 23 nt, synthetic construct
  misc_feature 1..23: note = Description of sequence: HCII siRNA antisense strand, modified; Strand ID: ETXS2460; Based on: SEQ ID NO: 152
  source 1..23: mol_type = other RNA
  modified_base 1^2: mod_base = OTHER; note = phosphorothioate linkage
  modified_base 1: mod_base = cm
  modified_base 2: mod_base = OTHER; note = 2'Fluoro-guanosine
  modified_base 3: mod_base = OTHER; note = 2'O-methyl-adenosine
  modified_base 4: mod_base = gm
  modified_base 5: mod_base = um
  modified_base 6: mod_base = OTHER; note = 2'Fluoro-uridine
  modified_base 7: mod_base = cm
  modified_base 8: mod_base = um
  modified_base 9: mod_base = gm
  modified_base 10: mod_base = um
  modified_base 11: mod_base = um
  modified_base 12: mod_base = um
  modified_base 13: mod_base = gm
  modified_base 14: mod_base = OTHER; note = 2'Fluoro-uridine
  modified_base 15: mod_base = cm
  modified_base 16: mod_base = OTHER; note = 2'Fluoro-adenosine
  modified_base 17: mod_base = um
  modified_base 18: mod_base = gm
  modified_base 19: mod_base = cm
  modified_base 20: mod_base = OTHER; note = 2'Fluoro-uridine
  modified_base 21: mod_base = um
  modified_base 22: mod_base = um
  modified_base 23: mod_base = um
cgagttctgtttgtcatgctttt

SEQ ID NO: 803 - RNA, 23 nt, synthetic construct
  misc_feature 1..23: note = Description of sequence: HCII siRNA antisense strand, modified; Strand ID: ETXS2462; Based on: SEQ ID NO: 152
  source 1..23: mol_type = other RNA
  modified_base 1^2: mod_base = OTHER; note = phosphorothioate linkage
  modified_base 2^3: mod_base = OTHER; note = phosphorothioate linkage
  modified_base 21^22: mod_base = OTHER; note = phosphorothioate linkage
  modified_base 22^23: mod_base = OTHER; note = phosphorothioate linkage
  modified_base 1: mod_base = cm
  modified_base 2: mod_base = OTHER; note = 2'Fluoro-guanosine
  modified_base 3: mod_base = OTHER; note = 2'O-methyl-adenosine
  modified_base 4: mod_base = OTHER; note = 2'Fluoro-guanosine
  modified_base 5: mod_base = um
  modified_base 6: mod_base = OTHER; note = 2'Fluoro-uridine
  modified_base 7: mod_base = cm
  modified_base 8: mod_base = um
  modified_base 9: mod_base = gm
  modified_base 10: mod_base = um
  modified_base 11: mod_base = um
  modified_base 12: mod_base = um
  modified_base 13: mod_base = gm
  modified_base 14: mod_base = OTHER; note = 2'Fluoro-uridine
  modified_base 15: mod_base = cm
  modified_base 16: mod_base = OTHER; note = 2'Fluoro-adenosine
  modified_base 17: mod_base = um
  modified_base 18: mod_base = gm
  modified_base 19: mod_base = cm
  modified_base 20: mod_base = um
  modified_base 21: mod_base = um
  modified_base 22: mod_base = um
  modified_base 23: mod_base = um
cgagttctgtttgtcatgctttt

SEQ ID NO: 804 - RNA, 23 nt, synthetic construct
  misc_feature 1..23: note = Description of sequence: HCII siRNA antisense strand, modified; Strand ID: ETXS2464; Based on: SEQ ID NO: 152
  source 1..23: mol_type = other RNA
  modified_base 1^2: mod_base = OTHER; note = phosphorothioate linkage
  modified_base 2^3: mod_base = OTHER; note = phosphorothioate linkage
  modified_base 21^22: mod_base = OTHER; note = phosphorothioate linkage
  modified_base 22^23: mod_base = OTHER; note = phosphorothioate linkage
  modified_base 1: mod_base = cm
  modified_base 2: mod_base = OTHER; note = 2'Fluoro-guanosine
  modified_base 3: mod_base = OTHER; note = 2'O-methyl-adenosine
  modified_base 4: mod_base = OTHER; note = 2'Fluoro-guanosine
  modified_base 5: mod_base = um
  modified_base 6: mod_base = OTHER; note = 2'Fluoro-uridine
  modified_base 7: mod_base = cm
  modified_base 8: mod_base = OTHER; note = 2'Fluoro-uridine
  modified_base 9: mod_base = OTHER; note = 2'Fluoro-guanosine
  modified_base 10: mod_base = um
  modified_base 11: mod_base = um
  modified_base 12: mod_base = um
  modified_base 13: mod_base = gm
  modified_base 14: mod_base = OTHER; note = 2'Fluoro-uridine
  modified_base 15: mod_base = cm
  modified_base 16: mod_base = OTHER; note = 2'Fluoro-adenosine
  modified_base 17: mod_base = um
  modified_base 18: mod_base = gm
  modified_base 19: mod_base = cm
  modified_base 20: mod_base = um
  modified_base 21: mod_base = um
  modified_base 22: mod_base = um
  modified_base 23: mod_base = um
cgagttctgtttgtcatgctttt

SEQ ID NO: 805 - RNA, 23 nt, synthetic construct
  misc_feature 1..23: note = Description of sequence: HCII siRNA antisense strand, modified; Strand ID: ETXS2466; Based on: SEQ ID NO: 152
  source 1..23: mol_type = other RNA
  modified_base 1^2: mod_base = OTHER; note = phosphorothioate linkage
  modified_base 2^3: mod_base = OTHER; note = phosphorothioate linkage
  modified_base 21^22: mod_base = OTHER; note = phosphorothioate linkage
  modified_base 22^23: mod_base = OTHER; note = phosphorothioate linkage
  modified_base 1: mod_base = cm
  modified_base 2: mod_base = OTHER; note = 2'Fluoro-guanosine
  modified_base 3: mod_base = OTHER; note = 2'O-methyl-adenosine
  modified_base 4: mod_base = gm
  modified_base 5: mod_base = um
  modified_base 6: mod_base = OTHER; note = 2'Fluoro-uridine
  modified_base 7: mod_base = cm
  modified_base 8: mod_base = OTHER; note = 2'Fluoro-uridine
  modified_base 9: mod_base = OTHER; note = 2'Fluoro-guanosine
  modified_base 10: mod_base = um
  modified_base 11: mod_base = um
  modified_base 12: mod_base = um
  modified_base 13: mod_base = gm
  modified_base 14: mod_base = OTHER; note = 2'Fluoro-uridine
  modified_base 15: mod_base = cm
  modified_base 16: mod_base = OTHER; note = 2'Fluoro-adenosine
  modified_base 17: mod_base = um
  modified_base 18: mod_base = OTHER; note = 2'Fluoro-guanosine
  modified_base 19: mod_base = cm
  modified_base 20: mod_base = um
  modified_base 21: mod_base = um
  modified_base 22: mod_base = um
  modified_base 23: mod_base = um
cgagttctgtttgtcatgctttt

SEQ ID NO: 806 - RNA, 23 nt, synthetic construct
  misc_feature 1..23: note = Description of sequence: HCII siRNA antisense strand, modified; Strand ID: ETXS2468; Based on: SEQ ID NO: 152
  source 1..23: mol_type = other RNA
  modified_base 1^2: mod_base = OTHER; note = phosphorothioate linkage
  modified_base 2^3: mod_base = OTHER; note = phosphorothioate linkage
  modified_base 21^22: mod_base = OTHER; note = phosphorothioate linkage
  modified_base 22^23: mod_base = OTHER; note = phosphorothioate linkage
  modified_base 1: mod_base = cm
  modified_base 2: mod_base = OTHER; note = 2'Fluoro-guanosine
  modified_base 3: mod_base = OTHER; note = 2'O-methyl-adenosine
  modified_base 4: mod_base = gm
  modified_base 5: mod_base = um
  modified_base 6: mod_base = OTHER; note = 2'Fluoro-uridine
  modified_base 7: mod_base = cm
  modified_base 8: mod_base = OTHER; note = 2'Fluoro-uridine
  modified_base 9: mod_base = OTHER; note = 2'Fluoro-guanosine
  modified_base 10: mod_base = um
  modified_base 11: mod_base = um
  modified_base 12: mod_base = um
  modified_base 13: mod_base = gm
  modified_base 14: mod_base = OTHER; note = 2'Fluoro-uridine
  modified_base 15: mod_base = cm
  modified_base 16: mod_base = OTHER; note = 2'Fluoro-adenosine
  modified_base 17: mod_base = um
  modified_base 18: mod_base = gm
  modified_base 19: mod_base = cm
  modified_base 20: mod_base = OTHER; note = 2'Fluoro-uridine
  modified_base 21: mod_base = um
  modified_base 22: mod_base = um
  modified_base 23: mod_base = um
cgagttctgtttgtcatgctttt

SEQ ID NO: 807 - RNA, 21 nt, synthetic construct
  misc_feature 1..21: note = Description of sequence: HCII siRNA antisense strand, modified; Strand ID: ETXS2433; Based on: SEQ ID NO: 260
  source 1..21: mol_type = other RNA
  modified_base 1^2: mod_base = OTHER; note = phosphorothioate linkage
  modified_base 2^3: mod_base = OTHER; note = phosphorothioate linkage
  modified_base <1: mod_base = OTHER; note = two abasic inverted nucleoside overhang
  modified_base 1: mod_base = OTHER; note = 2'O-methyl-adenosine
  modified_base 2: mod_base = OTHER; note = 2'O-methyl-adenosine
  modified_base 3: mod_base = OTHER; note = 2'O-methyl-adenosine
  modified_base 4: mod_base = OTHER; note = 2'O-methyl-adenosine
  modified_base 5: mod_base = OTHER; note = 2'O-methyl-adenosine
  modified_base 6: mod_base = OTHER; note = 2'O-methyl-guanosine
  modified_base 7: mod_base = OTHER; note = 2'O-methyl-cytidine
  modified_base 9: mod_base = OTHER; note = 2'Fluoro-uridine
  modified_base 10: mod_base = OTHER; note = 2'Fluoro-guanosine
  modified_base 11: mod_base = OTHER; note = 2'Fluoro-adenosine
  modified_base 12: mod_base = OTHER; note = 2'O-methyl-cytidine
  modified_base 13: mod_base = OTHER; note = 2'O-methyl-adenosine
  modified_base 14: mod_base = OTHER; note = 2'O-methyl-adenosine
  modified_base 15: mod_base = OTHER; note = 2'O-methyl-adenosine
  modified_base 16: mod_base = OTHER; note = 2'O-methyl-cytidine
  modified_base 17: mod_base = OTHER; note = 2'O-methyl-adenosine
  modified_base 18: mod_base = OTHER; note = 2'O-methyl-guanosine
  modified_base 19: mod_base = OTHER; note = 2'O-methyl-adenosine
  modified_base 20: mod_base = OTHER; note = 2'O-methyl-adenosine
  modified_base 21: mod_base = OTHER; note = 2'O-methyl-cytidine
aaaaagcatgacaaacagaac

SEQ ID NO: 808 - RNA, 21 nt, synthetic construct
  misc_feature 1..21: note = Description of sequence: HCII siRNA antisense strand, modified; Strand ID: ETXS2435; Based on: SEQ ID NO: 272
  source 1..21: mol_type = other RNA
  modified_base 1^2: mod_base = OTHER; note = phosphorothioate linkage
  modified_base 2^3: mod_base = OTHER; note = phosphorothioate linkage
  modified_base <1: mod_base = OTHER; note = two abasic inverted nucleoside overhang
  modified_base 1: mod_base = OTHER; note = 2'O-methyl-adenosine
  modified_base 2: mod_base = OTHER; note = 2'O-methyl-adenosine
  modified_base 3: mod_base = OTHER; note = 2'O-methyl-guanosine
  modified_base 5: mod_base = OTHER; note = 2'O-methyl-uridine
  modified_base 6: mod_base = OTHER; note = 2'O-methyl-guanosine
  modified_base 7: mod_base = OTHER; note = 2'O-methyl-adenosine
  modified_base 8: mod_base = OTHER; note = 2'Fluoro-cytidine
  modified_base 9: mod_base = OTHER; note = 2'Fluoro-adenosine
  modified_base 10: mod_base = OTHER; note = 2'Fluoro-adenosine
  modified_base 11: mod_base = OTHER; note = 2'O-methyl-adenosine
  modified_base 12: mod_base = OTHER; note = 2'O-methyl-cytidine
  modified_base 13: mod_base = OTHER; note = 2'O-methyl-adenosine
  modified_base 14: mod_base = OTHER; note = 2'O-methyl-guanosine
  modified_base 15: mod_base = OTHER; note = 2'O-methyl-adenosine
  modified_base 16: mod_base = OTHER; note = 2'O-methyl-adenosine
  modified_base 17: mod_base = OTHER; note = 2'O-methyl-cytidine
  modified_base 18: mod_base = OTHER; note = 2'O-methyl-uridine
  modified_base 19: mod_base = OTHER; note = 2'O-methyl-cytidine
  modified_base 20: mod_base = OTHER; note = 2'O-methyl-guanosine
aagcatgacaaacagaactcg
